(19) United States
(12) Patent Application Publication
(10) Pub. No.: US 2024/0010722 A1
(43) Pub. Date: Jan. 11, 2024

(54) MADCAM TARGETED THERAPEUTICS AND USES THEREOF

(71) Applicant: PANDION OPERATIONS, INC., Watertown, MA (US)

(72) Inventors: Nathan HIGGINSON-SCOTT, Hingham, MA (US); Joanne L. VINEY, Belmont, MA (US); Salvatore ALIOTO, Somerville, MA (US); Lindsay J. EDWARDS, Littleton, MA (US); Kevin Lewis OTIPOBY, Ashland, MA (US); Jyothsna VISWESWARAIAH, Arlington, MA (US)

(73) Assignee: PANDION OPERATIONS, INC., Watertown, MA (US)

(21) Appl. No.: 18/252,081

(22) PCT Filed: Nov. 18, 2021
(86) PCT No.: PCT/US2021/059846

§ 371 Date: May 8, 2023

Related U.S. Application Data
(60) Provisional application No. 63/117,918, filed on Nov. 24, 2020.
(60) Provisional application No. 63/117,914, filed on Nov. 24, 2020.
(60) Provisional application No. 63/115,243, filed on Nov. 18, 2020.
(60) Provisional application No. 63/115,235, filed on Nov. 18, 2020.

(51) Int. Cl. C07K 16/28; A61P 37/02

(52) U.S. Cl. CPC C07K 16/2803; C07K 16/2818; A61P 37/02; C07K 2317/565; C07K 2317/622

(57) ABSTRACT

Methods and compounds for conferring site-specific or local immune privilege, such as targeting to a cell expressing MAdCAM.

### CROSS-REFERENCE TO RELATED APPLICATIONS

[0001] This application claims priority to U.S. Provisional Application No. 63/115,235, filed Nov. 18, 2020, U.S. Application No. 63/115,243, filed Nov. 18, 2020, U.S. Application No. 63/117,914, filed Nov. 24, 2020, U.S. Application No. 63/117,918, filed Nov. 24, 2020, each of which is hereby incorporated by reference in its entirety.

### SEQUENCE LISTING

[0002] The instant application contains a Sequence Listing which has been submitted electronically in ASCII format and is hereby incorporated by reference in its entirety. Said ASCII copy, created on Nov. 18, 2021, is named 145256_001602_SL.txt and is 1,095,063 bytes in size.

### FIELD

[0003] The embodiments provided herein relate to, for example, methods and compositions for local or targeted immune-privilege.

### BACKGROUND

[0004] Instances of unwanted immune responses, e.g., as in the rejection of transplanted tissue or in autoimmune disorders, constitute a major health problem for millions of people across the world. Long-term outcomes for organ transplantation are frequently characterized by chronic rejection, and eventual failure of the transplanted organ. More than twenty autoimmune disorders are known, affecting essentially every organ of the body, and affecting over fifty million people in North America alone. The broadly active immunosuppressive medications used to combat the pathogenic immune response in both scenarios have serious side effects.

### SUMMARY

[0005] In some embodiments, antibodies, or antigen binding fragments thereof, that binds to MAdCAM are provided. In some embodiments, antibodies, or antigen binding fragments thereof, comprising a heavy chain variable region and a light chain variable region, wherein:
[0006] the heavy chain variable region comprises a variable heavy CDR1 (HCDR1) having at least 90% identity to an amino acid sequence of SEQ ID NO: 1499, a variable heavy CDR2 (HCDR2) having at least 90% identity to an amino acid sequence of SEQ ID NO: 1506, and variable heavy CDR3 (HCDR3) having at least 90% identity to an amino acid sequence of SEQ ID NO: 1507, 1531 or 1532; and
[0007] the light chain variable region comprises a variable light CDR1 (LCDR1) having at least 90% identity to an amino acid sequence of SEQ ID NO: 1502, a variable light CDR2 (LCDR2) having at least 90% identity to an amino acid sequence of SEQ ID NO: 1497, and a variable light CDR3 (LCDR3) having at least 90% identity to an amino acid sequence of SEQ ID NO: 1498, are provided.

[0008] In some embodiments, antibodies, or antigen binding fragments thereof are provided, wherein the antibody comprises: a light chain variable region comprising an amino acid sequence having at least 90% identity to an amino acid sequence selected from SEQ ID NOs: 592, 663, 667, 669, 670, 671, 673, 674, 675, 677, 678, 679, 680, 681, 682, 683, 684, 685, 686, 687, 689, 690, 692, 694, 696, 698, 700, 702, 704, 706, 708, 710, 713, 715, 717, 719, 721, 723, 725, 727, 729, 731, 733, 735, 737, 739, 741, 743, 745, 747, 749, 751, 753, 755, 757, 759, 761, 763, 765, 768, 770, 772, 774, 776, 778, 780, 782, 784, 786, 788, 790, 792, 794, 796, 798, 800, 802, 804, 806, 808, 810, 812, 814, 816, 818, 820, 822, 824, 826, 828, 830, 832, 834, 836, 838, 840, 841, 843, 845, 847, 848, 850, 852, 853, 855, 857, 859, 861, 863, 864, 866, 868, 870, 872, 874, 875, 876, 878, 882, 1360, 1361, 1362, 1363, 1364, 1365, 1366, 1367, 1368, 1369, 1370, 1371, 1372, 1373, 1374, 1375, 1376, 1380, 1381, 1382, 1383, 1384, 1385, 1386, 1464, 1465, 1466, 1467, 1535, 1536, 1537, or 1543; and the variable heavy chain comprising an amino acid sequence having at least 90% identity to an amino acid sequence selected from SEQ ID NOs: 591, 662, 664, 665, 666, 668, 672, 676, 688, 691, 693, 695, 697, 699, 701, 703, 705, 707, 709, 711, 712, 714, 716, 718, 720, 722, 724, 726, 728, 730, 732, 734, 736, 738, 740, 742, 744, 746, 748, 750, 752, 754, 756, 758, 760, 762, 764, 767, 769, 771, 773, 775, 777, 779, 781, 783, 785, 787, 789, 791, 793, 795, 797, 799, 801, 803, 805, 807, 809, 811, 813, 815, 817, 819, 821, 823, 825, 827, 829, 831, 833, 835, 837, 839, 841, 842, 844, 846, 849, 851, 854, 856, 858, 860, 862, 865, 867, 869, 871, 873, 877, 879, 880, 881, 1346, 1347, 1348, 1349, 1350, 1351, 1352, 1353, 1354, 1355, 1356, 1357, 1358, 1377, 1378, 1379, 1387, 1388, 1389, 1390, 1391, 1392, 1393, 1394, 1395, 1396, 1397, 1398, 1439, 1440, 1441, 1442, 1443, 1444, 1445, 1450, 1451, 1452, 1453, 1454, 1455, 1456, 1457, 1458, 1459, 1460, 1461, 1462, 1463, 1469, 1470, 1471, 1472, 1473, 1474, 1475, 1477, 1480, 1533, 1534, 1542, 1544, or 1545.

[0009] In some embodiments, pharmaceutical compositions comprising the antibody, or antigen binding fragment thereof, as provided herein, and a pharmaceutically acceptable carrier are provided.

[0010] In some embodiments, methods of treating a subject with inflammatory bowel disease are provided. In some embodiments, the method comprises administering a polypeptide or antibody as provided herein, or a pharmaceutical composition comprising the same, to the subject to treat the inflammatory bowel disease.

[0011] In some embodiments, methods of treating a subject with an auto-immune hepatitis, a primary sclerosing cholangitis, a Type 1 diabetes, a transplant, a GVHD, an elevated risk, or at risk, for having, an autoimmune disorder are provided. In some embodiments, the method comprises administering a polypeptide or antibody as provided herein, or a pharmaceutical composition comprising the same, to the subject to treat the auto-immune hepatitis, the primary sclerosing cholangitis, the Type 1 diabetes, the transplant, the GVHD, the elevated risk, or at risk, for having, an autoimmune disorder.

### BRIEF DESCRIPTION OF THE DRAWINGS

[0012] FIG. 1 depicts non-limiting embodiments of the therapeutic compounds provided herein.

[0013] FIG. 2 depicts a non-limiting illustration of how a therapeutic compound provided herein could function.

[0014] FIG. 3 depicts a non-limiting illustration of the therapeutic compounds provided herein.

[0015] FIG. 3A depicts a non-limiting illustration of the therapeutic compounds provided herein.

[0016] FIG. 4 depicts a non-limiting illustration of the therapeutic compounds provided herein.

[0017] FIG. 5 depicts a non-limiting illustration of the therapeutic compounds provided herein.

[0018] FIG. 6 depicts a non-limiting illustration of the therapeutic compounds provided herein.

[0019] FIG. 7 depicts a non-limiting illustration of the therapeutic compounds provided herein.

[0020] FIG. 8 depicts a non-limiting illustration of the therapeutic compounds provided herein.

[0021] FIG. 9 depicts a non-limiting illustration of the therapeutic compounds provided herein.

[0022] FIG. 10 depicts a non-limiting illustration of the therapeutic compounds provided herein.

[0023] FIG. 11 depicts a non-limiting illustration of the therapeutic compounds provided herein.

[0024] FIG. 12 depicts a non-limiting illustration of the therapeutic compounds provided herein.

[0025] FIG. 13 depicts a non-limiting illustration of the therapeutic compounds provided herein.

[0026] FIG. 14 depicts a non-limiting illustration of the therapeutic compounds provided herein.

[0027] FIG. 15 depicts a non-limiting illustration of the therapeutic compounds provided herein.

[0028] FIG. 16 depicts a non-limiting illustration of the therapeutic compounds provided herein.

[0029] FIG. 17 depicts a non-limiting illustration of the therapeutic compounds provided herein.

[0030] FIG. 18 depicts a non-limiting illustration of the therapeutic compounds provided herein.

[0031] FIG. 19 depicts a non-limiting illustration of the therapeutic compounds provided herein.

[0032] FIGS. 20A and 20B depict localization of antibodies in the gut 4 weeks following SC administration.

### DETAILED DESCRIPTION

[0033] This application incorporates by reference each of the following in its entirety: U.S. Provisional Application No. 63/115,243 filed Nov. 18, 2020, U.S. Provisional Application No. 63/115,235 filed Nov. 18, 2020, PCT Application No. PCT/US2020/046920 filed Aug. 19, 2020, U.S. Non-Provisional application Ser. No. 16/997,238 filed Aug. 19, 2020, PCT Application No. PCT/US2020/033707 filed May 20, 2020, and U.S. Provisional Application No. 62/850,172, filed May 20, 2019, U.S. application Ser. No. 15/922,592 filed Mar. 15, 2018 and PCT Application No. PCT/US2018/022675, filed Mar. 15, 2018. This application also incorporate by reference, each of the following in their entirety: U.S. Provisional Application No. 62/721,644, filed Aug. 23, 2018, U.S. provisional Application No. 62/675,972 filed May 24, 2018, U.S. provisional Application No. 62/595,357 filed Dec. 6, 2017, U.S. Provisional Application No. 62/595,348, filed Dec. 6, 2017, U.S. Non-Provisional application Ser. No. 16/109,875, filed Aug. 23, 2018, U.S. Non-Provisional application Ser. No. 16/109,897, filed Aug. 23, 2018, U.S. Non-Provisional application Ser. No. 15/988,311, filed May 24, 2018, PCT Application No. PCT/US2018/034334, filed May 24, 2018, and, PCT/US2018/062780, filed Nov. 28, 2018.

[0034] As used herein and in the appended claims, the singular forms “a”, “an” and “the” include plural reference unless the context clearly dictates otherwise.

[0035] As used herein, the term “about” means that the numerical value is approximate and small variations would not significantly affect the practice of the disclosed embodiments. Where a numerical limitation is used, unless indicated otherwise by the context, “about” means the numerical value can vary by ±5% and remain within the scope of the disclosed embodiments. Thus, about 100 means 95 to 105.

[0036] As used herein, the term “animal” includes, but is not limited to, humans and non-human vertebrates such as wild, domestic, and farm animals.

[0037] As used herein, the term “contacting” means bringing together of two elements in an in vitro system or an in vivo system. For example, “contacting” a therapeutic compound with an individual or patient or cell includes the administration of the compound to an individual or patient, such as a human, as well as, for example, introducing a compound into a sample containing a cellular or purified preparation containing target.

[0038] As used herein, the terms “comprising” (and any form of comprising, such as “comprise”, “comprises”, and “comprised”), “having” (and any form of having, such as “have” and “has”), “including” (and any form of including, such as “includes” and “include”), or “containing” (and any form of containing, such as “contains” and “contain”), are inclusive or open-ended and do not exclude additional, unrecited elements or method steps. Any composition or method that recites the term “comprising” should also be understood to also describe such compositions as consisting, consisting of, or consisting essentially of the recited components or elements.

[0039] As used herein, the term “fused” or “linked” when used in reference to a protein having different domains or heterologous sequences means that the protein domains are part of the same peptide chain that are connected to one another with either peptide bonds or other covalent bonding. The domains or section can be linked or fused directly to one another or another domain or peptide sequence can be between the two domains or sequences and such sequences would still be considered to be fused or linked to one another. In some embodiments, the various domains or proteins provided for herein are linked or fused directly to one another or via a linker sequence, such as the glycine/serine sequences described herein to link the two domains together. Two peptide sequences are linked directly if they are directly connected to one another or indirectly if there is a linker or other structure that links the two regions. A linker can be directly linked to two different peptide sequences or domains.

[0040] As used herein, the term “individual,” “subject,” or “patient,” used interchangeably, means any animal, including mammals, such as mice, rats, other rodents, rabbits, dogs, cats, swine, cattle, sheep, horses, or primates, such as humans. Subject, as that term is used herein, refers to a mammalian subject, e.g., a human subject. In some embodiments, the subject is a non-human mammal, e.g., a horse, dog, cat, cow, goat, or pig.

[0041] As used herein, the term “inhibit” refers to a result, symptom, or activity being reduced as compared to the activity or result in the absence of the compound that is inhibiting the result, symptom, or activity. In some embodiments, the result, symptom, or activity, is inhibited by about, or, at least, 10%, 20%, 30%, 40%, 50%, 60%, 70%, 80%, 90%, 95%, or 99%. An result, symptom, or activity can also be inhibited if it is completely elimination or extinguished.

[0042] As used herein, the phrase “in need thereof” means that the subject has been identified as having a need for the particular method or treatment. In some embodiments, the identification can be by any means of diagnosis. In any of the methods and treatments described herein, the subject can be in need thereof. In some embodiments, the subject is in an environment or will be traveling to an environment in which a particular disease, disorder, or condition is prevalent.

[0043] As used herein, the phrase “integer from X to Y” means any integer that includes the endpoints. For example, the phrase “integer from 1 to 5” means 1, 2, 3, 4, or 5.

[0044] As used herein, the term “mammal” means a rodent (i.e., a mouse, a rat, or a guinea pig), a monkey, a cat, a dog, a cow, a horse, a pig, or a human. In some embodiments, the mammal is a human.

[0045] In some embodiments, therapeutic compounds are provided herein. In some embodiments, the therapeutic compound is a protein or a polypeptide, that has multiple peptide chains that interact with one another. The polypeptides can interact with one another through non-covalent interactions or covalent interactions, such as through disulfide bonds or other covalent bonds. Therefore, if an embodiment refers to a therapeutic compound it can also be said to refer to a protein or polypeptide as provided for herein and vice versa as the context dictates.

[0046] As used herein, the phrase “ophthalmically acceptable” means having no persistent detrimental effect on the treated eye or the functioning thereof, or on the general health of the subject being treated. However, it will be recognized that transient effects such as minor irritation or a “stinging” sensation are common with topical ophthalmic administration of drugs and the existence of such transient effects is not inconsistent with the composition, formulation, or ingredient (e.g., excipient) in question being “ophthalmically acceptable” as herein defined. In some embodiments, the pharmaceutical compositions can be ophthalmically acceptable or suitable for ophthalmic administration.

[0047] “Specific binding” or “specifically binds to” or is “specific for” a particular antigen, target, or an epitope means binding that is measurably different from a non-specific interaction. Specific binding can be measured, for example, by determining binding of a molecule compared to binding of a control molecule, which generally is a molecule of similar structure that does not have binding activity. For example, specific binding can be determined by competition with a control molecule that is similar to the target.

[0048] Specific binding for a particular antigen, target, or an epitope can be exhibited, for example, by an antibody having a K_{D} for an antigen or epitope of at least about 10^{-4 M}, at least about 10^{-5 M}, at least about 10^{-6 M}, at least about 10^{-7 M}, at least about 10^{-8 M}, at least about 10^{-9 M}, alternatively at least about 10^{-10 M} at least about 10^{-11 M} at least about 10^{-12 M}, or greater, where K_{D} refers to a dissociation rate of a particular antibody-target interaction. Typically, an antibody that specifically binds an antigen or target will have a K D that is, or at least, 2-, 4-, 5-, 10-, 20-, 50-, 100-, 500-, 1000-, 5,000-, 10,000-, or more times greater for a control molecule relative to the antigen or epitope.

[0049] In some embodiments, specific binding for a particular antigen, target, or an epitope can be exhibited, for example, by an antibody having a K_{A} or Kₐ for a target, antigen, or epitope of at least 2-, 4-, 5-, 20-, 50-, 100-, 500-, 1000-, 5,000-, 10,000- or more times greater for the target, antigen, or epitope relative to a control, where K_{A} or Kₐ refers to an association rate of a particular antibody-antigen interaction.

[0050] As provided herein, the therapeutic compounds and compositions can be used in methods of treatment as provided herein. As used herein, the terms “treat,” “treated,” or “treating” mean both therapeutic treatment and prophylactic measures wherein the object is to slow down (lessen) an undesired physiological condition, disorder or disease, or obtain beneficial or desired clinical results. For purposes of these embodiments, beneficial or desired clinical results include, but are not limited to, alleviation of symptoms; diminishment of extent of condition, disorder or disease; stabilized (i.e., not worsening) state of condition, disorder or disease; delay in onset or slowing of condition, disorder or disease progression; amelioration of the condition, disorder or disease state or remission (whether partial or total), whether detectable or undetectable; an amelioration of at least one measurable physical parameter, not necessarily discernible by the patient; or enhancement or improvement of condition, disorder or disease. Treatment includes eliciting a clinically significant response without excessive levels of side effects. Treatment also includes prolonging survival as compared to expected survival if not receiving treatment. Thus, “treatment of an auto-immune disease/disorder” means an activity that alleviates or ameliorates any of the primary phenomena or secondary symptoms associated with the auto-immune disease/disorder or other condition described herein. The various disease or conditions are provided herein. The therapeutic treatment can also be administered prophylactically to preventing or reduce the disease or condition before the onset.

### PD-1 Agonists

[0051] Provided herein are therapeutic compounds, e.g., therapeutic protein molecules, e.g., fusion proteins, including a targeting moiety and an effector binding/modulating moiety, typically as separate domains. Also provided are methods of using and making the therapeutic compounds. The targeting moiety serves to localize the therapeutic compound, and thus the effector binding/modulating moiety, to a site at which immune-privilege is desired. As used herein, “immune privilege” means lack of, or suppression of an inflammatory response. As a non-limiting example, immune privilege includes situations where a tissue or site in the body is able to tolerate the introduction of antigens without eliciting an inflammatory immune response (Forester J. V., Lambe H. Xu, Cornall R. Immune Privilege or privileged immunity? Mucosal Immunology, 1, 372-381 (2008)).

[0052] The effector binding/modulating moiety comprises one or more of: (a) an immune cell inhibitory molecule binding/modulating moiety (an ICIM binding/modulating moiety): (b) an immunosuppressive immune cell binding/modulating moiety (an IIC binding/modulating moiety); (c) a soluble molecule binding/modulating moiety (a SM binding/modulating moiety) or (d) a molecule that blocks or inhibits immune cell stimulatory molecule binding/modulating moiety (referred to herein as an ICSM binding/modulating moiety). In some embodiments, the ICSM inhibits immune activation by, for example, blocking the interaction between a costimulatory molecule and its counter structure. In some embodiments, a therapeutic compound comprises: (a) and (b); (a) and (c); (a) and (d); (b) and (c); (b) and (d); (c) and (d); or (a), (b), (c), and (d).

[0053] The present disclosure provides, for example, molecules that can act as PD-1 agonists. Without being bound to any particular theory, agonism of PD-1 inhibits T cell activation/signaling and can be accomplished by different mechanisms. For example crosslinking of bead-bound functional PD-1 agonists can lead to agonism. Functional PD-1 agonists have been described (Akkaya. Ph.D. Thesis: Modulation of the PD-1 pathway by inhibitory antibody superagonists. Christ Church College, Oxford, UK, 2012), which is hereby incorporated by reference. Crosslinking of PD-1 with two mAbs that bind non-overlapping epitopes induces PD-1 signaling (Davis, US 2011/0171220), which is hereby incorporated by reference. Another example is illustrated through the use of a goat anti-PD-1 antiserum (e.g. AF1086, R&D Systems) which is hereby incorporated by reference, which acts as an agonist when soluble (Said et al., 2010, Nat Med) which is hereby incorporated by reference. Non-limiting examples of PD-1 agonists that can be used in the present embodiments include, but are not limited to, UCB clone 19 or clone 10, PD1AB-1, PD1AB-2, PD1AB-3, PD1AB-4 and PD1AB-5, PD1AB-6 (Anaptys/Celgene), PD1-17, PD1-28, PD1-33 and PD1-35 (Collins et al, US 2008/0311117 A1 Antibodies against PD-1 and uses therefor, which is incorporated by reference), or can be a bi-specific, monovalent anti-PD-1/anti-CD3 (Ono), and the like. In some embodiments, the PD-1 agonist antibodies can be antibodies that block binding of PD-L1 to PD-1. In some embodiments, the PD-1 agonist antibodies can be antibodies that do not block binding of PD-L1 to PD-1.

[0054] PD-1 agonism can be measured by any method, such as the methods described in the examples. For example, cells can be constructed that express, including stably express, constructs that include a human PD-1 polypeptide fused to a b-galactosidase “Enzyme donor” and 2) a SHP-2 polypeptide fused to a b-galactosidase “Enzyme acceptor.” Without being bound by any theory, when PD-1 is engaged, SHP-2 is recruited to PD-1. The enzyme acceptor and enzyme donor form a fully active b-galactosidase enzyme that can be assayed. Although, the assay does not directly show PD-1 agonism, but shows activation of PD-1 signaling. PD-1 agonism can also be measured by measuring inhibition of T cell activation because, without being bound to any theory, PD-1 agonism inhibits anti-CD3-induced T cell activation. For example, PD-1 agonism can be measured by preactivating T cells with PHA (for human T cells) or ConA (for mouse T cells) so that they express PD-1. The cells can then be reactivated with anti-CD3 in the presence of anti-PD-1 (or PD-L1) for the PD-1 agonism assay. T cells that receive a PD-1 agonist signal in the presence of anti-CD3 will show decreased activation, relative to anti-CD3 stimulation alone. Activation can be readout by proliferation or cytokine production (IL-2, IFNg, IL-17) or other markers, such as CD69 activation marker. Thus, PD-1 agonism can be measured by either cytokine production or cell proliferation. Other methods can also be used to measure PD-1 agonism.

[0055] PD-1 is Ig superfamily member expressed on activated T cells and other immune cells. The natural ligands for PD-1 appear to be PD-L1 and PD-L2. Without being bound to any particular theory, when PD-L1 or PD-L2 bind to PD-1 on an activated T cell, an inhibitory signaling cascade is initiated, resulting in attenuation of the activated T effector cell function. Thus, blocking the interaction between PD-1 on a T cell, and PD-L1/2 on another cell (for example, a tumor cell) with a PD-1 antagonist is known as checkpoint inhibition, and releases the T cells from inhibition. In contrast, PD-1 agonist antibodies can bind to PD-1 and send an inhibitory signal and attenuate the function of a T cell. Thus, PD-1 agonist antibodies can be incorporated into various embodiments described herein as an effector molecule binding/modulating moiety (sometimes also referred to herein as an effector molecule), which can accomplish localized tissue-specific immunomodulation when paired with a targeting moiety.

[0056] The effector molecule binding/modulating moiety can provide an immunosuppressive signal or environment in a variety of ways. In some embodiments, the effector binding/modulating moiety comprises an ICIM binding/modulating moiety that directly binds and (under the appropriate conditions as described herein) activates an inhibitory receptor expressed by immune cells responsible for driving disease pathology. In another embodiment the effector binding/modulating moiety comprises and IIC binding/modulating moiety and binds and accumulates immunosuppressive immune cells. In some embodiments, the accumulated immune suppressive cells promote immune privilege. In another embodiment the effector binding/modulating moiety comprises an SM binding/modulating moiety which manipulates the surrounding microenvironment to make it less permissible for the function of immune cells, e.g., immune cells driving disease pathology. In some embodiments, the SM binding/modulating moiety depletes an entity that promotes immune attack or activation. In some embodiments the effector binding/modulating moiety comprises an ICSM binding/modulating moiety that binds a member of a pair of stimulatory molecules, e.g., costimulatory molecules, and inhibits the interaction between the costimulatory molecule and the costimulatory molecule counter structure, such as, but not limited to, OX40 or CD30 or CD40 and OX40L, or CD30L or CD40L and inhibits the immune stimulation of a cell, such as, but not limited to, a T cell, B cell, NK cell, or other immune cell comprising a member of the pair.

[0057] The targeting moiety and effector binding/modulating moiety are physically tethered, covalently or non-covalently, directly or through a linker entity, to one another, e.g., as a member of the same protein molecule in a therapeutic protein molecule. In some embodiments, the targeting and effector moieties are provided in a therapeutic protein molecule, e.g., a fusion protein, typically as separate domains. In some embodiments, the targeting moiety, the effector binding/modulating moiety, or both each comprises a single domain antibody molecule, e.g., a camelid antibody VHH molecule or human soluble VH domain. It may also contain a single-chain fragment variable (scFv) or a Fab domain. As used herein, the term “Fab” refers to a polypeptide consisting of the VH and CH1 domain of the heavy chain (the “Fab heavy chain”) and the VL and CL domain of the light chain (the “Fab light chain”) of an immunoglobulin. As used herein, the term “scFv” refers to a single-chain polypeptide consisting of the VH domain of the heavy chain (the “scFv heavy chain”) and the VL/VK of the light chain (the “scFv light chain”) of an immunoglobulin. In some embodiments, the therapeutic protein molecule, or a nucleic acid, e.g., an mRNA or DNA, encoding the therapeutic protein molecule, can be administered to a subject. In some embodiments, the targeting and effector molecule binding/modulating moieties are linked to a third entity, e.g., a carrier, e.g., a polymeric carrier, a dendrimer, or a particle, e.g., a nanoparticle. The therapeutic compounds can be used to down regulate an immune response at or in a tissue at a selected target or site while having no or substantially less immunosuppressive function systemically. The target or site can comprise donor tissue or autologous tissue.

[0058] Provided herein are methods of providing site-specific immune privilege for a transplanted donor tissue, e.g., an allograft tissue, e.g., a tissue described herein, e.g., an allograft liver, an allograft kidney, an allograft heart, an allograft pancreas, an allograft thymus or thymic tissue, allograft skin, or an allograft lung, with therapeutic compounds disclosed herein. In embodiments the treatment minimizes rejection of, minimizes immune effector cell mediated damage to, prolongs acceptance of, or prolongs the functional life of, donor transplant tissue.

[0059] Also provided herein are methods of inhibiting graft versus host disease (GVHD) by minimizing the ability of donor immune cells, e.g., donor T cells, to mediate immune attack of recipient tissue, with therapeutic compounds disclosed herein.

[0060] Also provided herein are methods of treating, e.g., therapeutically treating or prophylactically treating (or preventing), an autoimmune disorder or autoimmune response in a subject by administration of a therapeutic compound disclosed herein, e.g., to provide site or tissue specific modulation of the immune system. In some embodiments, the method provides tolerance to, minimization of the rejection of, minimization of immune effector cell mediated damage to, or prolonging a function of, subject tissue. In some embodiments, the therapeutic compound includes a targeting moiety that targets, e.g., specifically targets, the tissue under, or at risk for, autoimmune attack. Non-limiting exemplary tissues include, but are not limited to, the pancreas, myelin, salivary glands, synoviocytes, and myocytes.

[0061] In some embodiments, administration of the therapeutic compound begins after the disorder is apparent. In some embodiments, administration of the therapeutic compound begins prior to onset, or full onset, of the disorder. In some embodiments, administration of the therapeutic compound begins prior to onset, or full onset, of the disorder, e.g., in a subject having the disorder, a high-risk subject, a subject having a biomarker for risk or presence of the disorder, a subject having a family history of the disorder, or other indicator of risk of, or asymptomatic presence of, the disorder. For example, in some embodiments, a subject having islet cell damage but which is not yet diabetic, is treated.

[0062] While not wishing to be bound by theory, it is believed that the targeting moiety functions to bind and accumulate the therapeutic compound to a target selectively expressed at the anatomical site where immune privilege is desired. In some embodiments, e.g., in the context of donor tissue transplantation, the target moiety binds to a target, e.g., an allelic product, present in the donor tissue but not the recipient. For treatment of autoimmune disorders, the targeting moiety binds a target preferentially expressed at the anatomical site where immune privilege is desired, e.g., in the pancreas. For treatment of GVHD, the targeting moiety targets the host tissue, and protects the host against attack from transplanted immune effector cells derived from transplanted tissue.

[0063] Again, while not wishing to be bound by theory it is believed that the effector binding/modulating moiety serves to deliver an immunosuppressive signal or otherwise create an immune privileged environment.

[0064] Effector, as that term is used herein, refers to an entity, e.g., a cell or molecule, e.g., a soluble or cell surface molecule, which mediates an immune response.

[0065] Effector ligand binding molecule, as used herein, refers to a polypeptide that has sufficient sequence from a naturally occurring counter-ligand of an effector, that it can bind the effector with sufficient specificity that it can serve as an effector binding/modulating molecule. In some embodiments, it binds to effector with at least 10, 20, 30, 40, 50, 60, 70, 80, 90, or 95% of the affinity of the naturally occurring counter-ligand. In some embodiments, it has at least 60, 80, 90, 95, 99, or 100% sequence identity, or substantial sequence identity, with a naturally occurring counter-ligand for the effector.

[0066] Effector specific binding polypeptide, as used herein, refers to a polypeptide that can bind with sufficient specificity that it can serve as an effector binding/modulating moiety. In some embodiments, a specific binding polypeptide comprises a effector ligand binding molecule.

[0067] Unless otherwise defined, all technical and scientific terms used herein have the same meaning as commonly understood by one of ordinary skill in the art to which these embodiments belong. Although methods and materials similar or equivalent to those described herein can be used in the practice or testing of the present embodiments, suitable methods and materials are described below. All publications, patent applications, patents, and other references mentioned herein are incorporated by reference in their entirety. In addition, the materials, methods, and examples are illustrative only and not intended to be limiting. Headings, sub-headings or numbered or lettered elements, e.g., (a), (b), (i) etc., are presented merely for ease of reading. The use of headings or numbered or lettered elements in this document does not require the steps or elements be performed in alphabetical order or that the steps or elements are necessarily discrete from one another. Other features, objects, and advantages of the embodiments will be apparent from the description and drawings, and from the claims.

### Additional Definitions

[0068] Unless defined otherwise, all technical and scientific terms used herein have the same meaning as commonly understood by one of ordinary skill in the art to which the embodiments pertains. In describing and claiming the present embodiments, the following terminology and terminology otherwise referenced throughout the present application will be used according to how it is defined, where a definition is provided.

[0069] It is also to be understood that the terminology used herein is for the purpose of describing particular embodiments only, and is not intended to be limiting.

[0070] Antibody molecule, as that term is used herein, refers to a polypeptide, e.g., an immunoglobulin chain or fragment thereof, comprising at least one functional immunoglobulin variable domain sequence. An antibody molecule encompasses antibodies (e.g., full-length antibodies) and antibody fragments. In some embodiments, an antibody molecule comprises an antigen binding or functional fragment of a full length antibody, or a full length immunoglobulin chain. For example, a full-length antibody is an immunoglobulin (Ig) molecule (e.g., an IgG antibody) that is naturally occurring or formed by normal immunoglobulin gene fragment recombinatorial processes). In embodiments, an antibody molecule refers to an immunologically active, antigen-binding portion of an immunoglobulin molecule, such as an antibody fragment. An antibody fragment, e.g., functional fragment, comprises a portion of an antibody, e.g., Fab, Fab′, F(ab′)2, F(ab)2, variable fragment (Fv), domain antibody (dAb), or single chain variable fragment (scFv). A functional antibody fragment binds to the same antigen as that recognized by the intact (e.g., full-length) antibody. The terms “antibody fragment” or “functional fragment” also include isolated fragments consisting of the variable regions, such as the “Fv” fragments consisting of the variable regions of the heavy and light chains or recombinant single chain polypeptide molecules in which light and heavy variable regions are connected by a peptide linker (“scFv proteins”). In some embodiments, an antibody fragment does not include portions of antibodies without antigen binding activity, such as Fc fragments or single amino acid residues. Exemplary antibody molecules include full length antibodies and antibody fragments, e.g., dAb (domain antibody), single chain, Fab, Fab′, and F(ab′)2 fragments, and single chain variable fragments (scFvs).

[0071] Immunoglobulin chains exhibit the same general structure of relatively conserved framework regions (FR) joined by three hypervariable regions, also called complementarity determining regions or CDRs. The CDRs from the two chains of each pair are aligned by the framework regions, enabling binding to a specific epitope. From N-terminus to C-terminus, both light and heavy chains comprise the domains FR1, CDR1, FR2, CDR2, FR3, CDR3 and FR4. The assignment of amino acids to each domain is in accordance with the definitions of Kabat Sequences of Proteins of Immunological Interest (National Institutes of Health, Bethesda, Md. (1987 and 1991)), or Chothia & Lesk J. Mol. Biol. 196:901-917 (1987); Chothia et al. Nature 342:878-883 (1989). In some embodiments, the antibodies provided herein comprise the same FRs and different CDRs. In some embodiments, the antibodies provided herein comprise the same CDRs and different FRs. In some embodiments, mutations in the FR are in the heavy chain. In some embodiments, mutations in the FR are in the FR1 of the heavy chain. In some embodiments, mutations in the FR are in the FR2 of the heavy chain. In some embodiments, mutations in the FR are in the FR3 of the heavy chain. In some embodiments, mutations in the FR are in the FR4 of the heavy chain. In some embodiments, mutations in the FR are in the light chain. In some embodiments, mutations in the FR are in the FR1 of the light chain. In some embodiments, mutations in the FR are in the FR2 of the light chain. In some embodiments, mutations in the FR are in the FR3 of the light chain. In some embodiments, mutations in the FR are in the FR4 of the light chain. In some embodiments, mutations in the FR are in the heavy and light chains. In some embodiments, mutations in the FR are in any one or more of the FRs of the heavy and light chains.

[0072] The term “antibody molecule” also encompasses whole or antigen binding fragments of domain, or single domain, antibodies, which can also be referred to as “sdAb” or “VHH.” Domain antibodies comprise either V_{H} or V_{L} that can act as stand-alone, antibody fragments. Additionally, domain antibodies include heavy-chain-only antibodies (HCAbs). Domain antibodies also include a CH2 domain of an IgG as the base scaffold into which CDR loops are grafted. It can also be generally defined as a polypeptide or protein comprising an amino acid sequence that is comprised of four framework regions interrupted by three complementarity determining regions. This is represented as FR1-CDR1-FR2-CDR2-FR3-CDR3-FR4. sdAbs can be produced in camelids such as llamas, but can also be synthetically generated using techniques that are well known in the art. The numbering of the amino acid residues of a sdAb or polypeptide is according to the general numbering for VH domains given by Kabat et al. (“Sequence of proteins of immunological interest,” US Public Health Services, NIH Bethesda, MD, Publication No. 91, which is hereby incorporated by reference). According to this numbering, FR1 of a sdAb comprises the amino acid residues at positions 1-30, CDR1 of a sdAb comprises the amino acid residues at positions 31-36, FR2 of a sdAb comprises the amino acids at positions 36-49, CDR2 of a sdAb comprises the amino acid residues at positions 50-65, FR3 of a sdAb comprises the amino acid residues at positions 66-94, CDR3 of a sdAb comprises the amino acid residues at positions 95-102, and FR4 of a sdAb comprises the amino acid residues at positions 103-113. Domain antibodies are also described in WO2004041862 and WO2016065323, each of which is hereby incorporated by reference. The domain antibodies can be a targeting moiety as described herein.

[0073] Antibody molecules can be monospecific (e.g., monovalent or bivalent), bispecific (e.g., bivalent, trivalent, tetravalent, pentavalent, or hexavalent), trispecific (e.g., trivalent, tetravalent, pentavalent, hexavalent), or with higher orders of specificity (e.g., tetraspecific) and/or higher orders of valency beyond hexavalency. An antibody molecule can comprise a functional fragment of a light chain variable region and a functional fragment of a heavy chain variable region, or heavy and light chains may be fused together into a single polypeptide.

[0074] Examples of formats for multispecific therapeutic compounds, e.g., bispecific antibody molecules are shown in the following non-limiting examples. Although illustrated with antibody molecules, they can be used as platforms for therapeutic molecules that include other non-antibody moieties as specific binding or effector moieties. In some embodiments, these non-limiting examples are based upon either a symmetrical or asymmetrical Fc formats.

[0075] For example, the figures illustrate non-limiting and varied symmetric homodimer approach. In some embodiments, the dimerization interface centers around human IgG1 CH2-CH3 domains, which dimerize via a contact interface spanning both CH2/CH2 and CH3/CH3. The resulting bispecific antibodies shown have a total valence comprised of four binding units with two identical binding units at the N-terminus on each side of the dimer and two identical units at the C-terminus on each side of the dimer. In each case the binding units at the N-terminus of the homo-dimer are different from those at the C-terminus of the homo-dimer. Using this type of bivalency for both an inhibitory T cell receptor at either terminus of the molecule and bivalency for a tissue tethering antigen can be achieved at either end of the molecule.

[0076] For example, in FIG. 3, a non-limiting embodiment is illustrated. The N-terminus of the homodimer contains two identical Fab domains comprised of two identical light chains, which are separate polypeptides, interfaced with the n-terminal VH—CH1 domains of each heavy chain via the VH/VL interaction and Ckappa or Clambda interaction with CH1. The native disulfide bond between the Ckappa or Clambda with CH1 is present providing a covalent anchor between the light and heavy chains. At the c-terminus of this design are two identical scFv units where by (in this example) the c-terminus of the CH3 domain of the Fc, is followed by a flexible, hydrophilic linker typically comprised of (but not limited to) serine, glycine, alanine, and/or threonine residues, which is followed by the VH domain of each scFv unit, which is followed by a glycine/serine rich linker, followed by a VL domain. These tandem VH and VL domains associate to form a single chain fragment variable (scFv) appended at the c-terminus of the Fc. Two such units exist at the c-terminus of this molecule owing to the homodimeric nature centered at the Fc. The domain order of scFvs may be configured to be from N to C terminus either VH-Linker-VL or VL-Linker-VH.

[0077] A non-limiting example of a molecule that has different binding regions on the different ends is where, one end is a PD-1 agonist and the antibody that provides target specificity is an anti-MAdCAM-1 antibody. This can be illustrated as shown, for example, in FIG. 3A, which illustrates the molecules in different orientations.

[0078] In some embodiments, the MAdCAM antibody is a blocking or non-blocking antibody as described elsewhere herein. Without being bound to any theory, MAdCAM has been shown to interact with the headpiece of the integrin α4β7 expressed on lymphocytes via multiple residues within its two Ig superfamily I-set domains and the atomic level structural basis for that interaction has been described (Viney J L et al. (1996). J Immunol. 157, 2488-2497; Yu Y et al (2013). J Biol Chem. 288, 6284-6294; Yu Y et al (2012). J Cell Biol. 196, 131-146, each of which is incorporated by reference in its entirety). It has been shown in great structural, mechanistic and functional detail in both the human (Chen J et al (2003). Nat Struct Biol. 10, 995-1001; de Chateau M et al (2001). Biochemistry. 40, 13972-13979) and mouse (Day E S et al (2002). Cell Commun Adhes. 9, 205-219; Hoshino H et al (2011). J Histochem Cytochem. 59, 572-583) molecular systems that any interaction of MAdCAM with α4β7 is dependent on three dication binding sites present in the integrin beta 7 sub unit I-like domain and that these metal binding sites can coordinate with Ca2+, Mn2+, and Mg2+. Using cell adhesion assays, flow cytometry, and/or flow chamber assays in the presence of high levels of Ca2+ with or without Mg2+ or Mn2+, the MAdCAM/α4β7 interaction is shown to be of a lower functional affinity and permits rolling adhesion of lymphocytes, whereas in low Ca2+ but higher Mg2+ or Mn2+ which activates the integrin, the MAdCAM/α4β7 interaction is of a higher functional affinity and mediates firm lymphocyte adhesion (Chen J et al (2003). Nat Struct Biol. 10, 995-1001). A number of groups have shown that various cell:cell, cell:membrane prep, and/or cell:protein based adhesion/interaction assays can be utilized, with FACS, cell flow chamber based counts, or IHC based read-outs to monitor the impact of anti-MAdCAM or anti-α4β7 antibodies upon the interaction of MAdCAM with α4β7, allowing one to identify blocking or non-blocking antibodies (Nakache, M et al (1989). Nature. 337, 179-181; Streeter, P R et al (1988). Nature. 331. 41-46; Yang Y et al (1995). Scand J Immunol. 42. 235-247; Leung E et al (2004). Immunol Cell Biol. 82. 400-409; Pullen N et al (2009). B J Pharmacol. 157. 281-293; Soler D et al (2009). J Pharmacol Exp Ther. 330. 864-875; Qi J et al (2012). J Biol Chem. 287. 15749-15759). This has been exemplified in the mouse system setting with the identification of anti-mouse MAdCAM antibodies such as MECA-89 (non-blocking) and MECA-367 (blocking)) Nakache, M et al (1989). Nature. 337, 179-181; Streeter, P R et al (1988). Nature. 331. 41-46; Yang Y et al (1995). Scand J Immunol. 42. 235-247). In a human system, antibodies have been identified that block the interaction of human MAdCAM with human α4β7 such as anti-human MAdCAM PF-00547659 (Pullen N et al (2009). B J Pharmacol. 157. 281-293) and anti-human α4β7 vedolizumab (Soler D et al (2009). J Pharmacol Exp Ther. 330. 864-875), as well as antibodies that do not block the interaction such as anti-human MAdCAM clone 17F5 (Soler D et al (2009). J Pharmacol Exp Ther. 330. 864-875), and anti-human α4β7 clone J19 (Qi J et al (2012). J Biol Chem. 287. 15749-15759). Thus, the antibody can either be blocking or non-blocking based upon the desired effect. In some embodiments, the antibody is a non-blocking MAdCAM antibody. In some embodiments, the antibody is a blocking MAdCAM antibody. One non-limiting example of demonstrating whether an antibody is blocking or non-blocking can be found throughout the examples, but any method can be used. Each of the references described herein are incorporated by reference in its entirety. In some embodiments, the PD-1 Agonist is replaced with an IL-2 mutein, such as, but not limited to, the ones described herein.

[0079] In another example, and as depicted in FIG. 4, the N-terminus of the homodimer contains two identical Fab domains comprised of two identical light chains, which are separate polypeptides, interfaced with the n-terminal VH—CH1 domains of each heavy chain via the VH/VL interaction and Ckappa or Clambda interaction with CH1. The native disulfide bond between the Ckappa or Clambda with CH1 is present providing a covalent anchor between the light and heavy chains. At the c-terminus of this design are two identical VH units (though non-antibody moieties could also be substituted here or at any of the four terminal attachment/fusion points) where by (in this example) the c-terminus of the CH3 domain of the Fc, is followed by a flexible, hydrophilic linker typically comprised of (but not limited to) serine, glycine, alanine, and/or threonine residues, which is followed by a soluble independent VH3 germline family based VH domain. Two such units exist at the c-terminus of this molecule owing to the homodimeric nature centered at the Fc.

[0080] In another non-limiting example, as depicted in FIG. 5, the N-terminus of the homodimer contains two identical Fab domains comprised of two identical light chains, which, unlike FIG. 3 and FIG. 4, are physically conjoined with the heavy chain at the N-terminus via a linker between the c-terminus of Ckappa or Clambda and the N-terminus of the VH. The linker may be 36-80 amino acids in length and comprised of serine, glycine, alanine and threonine residues. The physically conjoined n-terminal light chains interface with the n-terminal VH—CH1 domains of each heavy chain via the VH/VL interaction and Ckappa or Clambda interaction with CH1. The native disulfide bond between the Ckappa or Clambda with CH1 is present providing additional stability between the light and heavy chains. At the c-terminus of this design are two identical Fab units where by (in this example) the c-terminus of the CH3 domain of the Fc, is followed by a flexible, hydrophilic linker typically comprised of (but not limited to) serine, glycine, alanine, and/or threonine residues, which is followed by a CH1 domain, followed by a VH domain at the c-terminus. The light chain that is designed to pair with the c-terminal CH1/VH domains is expressed as a separate polypeptide, unlike the N-terminal light chain which is conjoined to the n-terminal VH/CH1 domains as described. The C-terminal light chains form an interface at between VH/VL and Ckappa or Clambda with CH1. The native disulfide anchors this light chain to the heavy chain. Again, any of the antibody moieties at any of the four attachment/fusion points can be substituted with a non-antibody moiety, e.g., a effector binding/modulating moiety that does not comprise an antibody molecule.

[0081] The bispecific antibodies can also be asymmetric as shown in the following non-limiting examples. Non-limiting example are also depicted in FIG. 6, FIG. 7, and FIG. 8, which illustrate an asymmetric/heterodimer approach. Again, in any of these formats, any of the antibody moieties at any of the four attachment/fusion points can be substituted with a non-antibody moiety, e.g., a effector binding/modulating moiety that does not comprise an antibody molecule. In some embodiments, the dimerization interface centers around the human IgG1 CH2-CH3 domains, which dimerize via a contact interface spanning both CH2/CH2 and CH3/CH3. However, in order to achieve heterodimerization instead of homodimerization of each heavy chain, mutations are introduced in each CH3 domain. The heterodimerizing mutations include T366W mutation (kabat) in one CH3 domain and T366S, L368A, and Y407V (kabat) mutations in the other CH3 domain. The heterodimerizing interface may be further stabilized with de novo disulfide bonds via mutation of native residues to cysteine residues such as S354 and Y349 on opposite sides of the CH3/CH3 interface. The resulting bispecific antibodies shown have a total valence comprised of four binding units. With this approach, the overall molecule can be designed to have bispecificity at just one terminus and monospecificity at the other terminus (trispecificity overall) or bispecificity at either terminus with an overall molecular specificity of 2 or 4. In the illustrative examples below, the C-terminus comprises two identical binding domains which could, for example, provide bivalent monospecificity for a tissue tethering target. At the N-terminus of all three of the illustrative examples, both binding domains comprise different recognition elements/paratopes and which could achieve recognition of two different epitopes on the same effector moiety target, or could recognize for examples a T cell inhibitory receptor and CD3. In some embodiments, the N-terminal binding moieties may be interchanged with other single polypeptide formats such as scFv, single chain Fab, tandem scFv, VH or VH11 domain antibody configurations for example. Other types of recognition element may be used also, such as linear or cyclic peptides.

[0082] An example of an asymmetric molecule is depicted in FIG. 6. Referring to FIG. 6, the N-terminus of the molecule is comprised of a first light chain paired with a first heavy chain via VH/VL and Ckappa or Clambda/CH1 interactions and a covalent tether comprised of the native heavy/light chain disulfide bond. On the opposite side of this heterodimeric molecule at the N-terminus is a second light chain and a second heavy chain which are physically conjoined via a linker between the c-terminus of Ckappa or Clambda and the N-terminus of the VH. The linker may be 36-80 amino acids in length and comprised of serine, glycine, alanine and threonine residues. The physically conjoined n-terminal light chains interface with the n-terminal VH—CH1 domains of each heavy chain via the VH/VL interaction and Ckappa or Clambda interaction with CH1. The native disulfide bond between the Ckappa or Clambda with CH1 is present providing additional stability between the light and heavy chains. At the c-terminus of the molecule are two identical soluble VH3 germline family VH domains joined via an N-terminal glycine/serine/alanine/threonine based linker to the c-terminus of the CH3 domain of both heavy chain 1 and heavy chain 2.

[0083] In some embodiments, an asymmetric molecule can be as illustrated as depicted in FIG. 7. For example, the N-terminus of the molecule is comprised of two different VH3 germlined based soluble VH domains linked to the human IgG1 hinge region via a glycine/serine/alanine/threonine based linker. The VH domain connected to the first heavy chain is different to the VH domain connected to the second heavy chain. At the c-terminus of each heavy chain is an additional soluble VH3 germline based VH domain, which is identical on each of the two heavy chains. The heavy chain heterodimerizes via the previously described knobs into holes mutations present at the CH3 interface of the Fc module.

[0084] In some embodiments, an asymmetric molecule can be as illustrated in FIG. 8. This example is similar to the molecule shown in FIG. 7, except both N-terminal Fab units are configured in a way that light chain 1 and light chain 2 are physically conjoined with heavy chain 1 and heavy chain 2 via a linker between the c-terminus of Ckappa or Clambda and the N-terminus of each respective VH. The linker in each case may be 36-80 amino acids in length and comprised of serine, glycine, alanine and threonine residues. The physically conjoined n-terminal light chains interface with the n-terminal VH—CH1 domains of each heavy chain via the VH/VL interaction and Ckappa or Clambda interaction with CH1. The native disulfide bond between the Ckappa or Clambda with CH1 is present providing additional stability between the light and heavy chains.

[0085] Bi-specific molecules can also have a mixed format. This is illustrated, for example, in FIG. 9, FIG. 10, and FIG. 11. In some embodiments, the bi-specific molecule comprises a Fab moiety and a scFv moiety, for example, as shown in FIG. 3, FIG. 3A, or FIG. 11.

[0086] For example, as illustrated in FIG. 9, illustrates a homodimer Fc based approach (see FIGS. 3, 4, and 5), combined with the moiety format selection of FIG. 7, whereby the total molecular valency is four, but specificity is restricted to two specificities. The N-terminus is comprised of two identical soluble VH3 germline based VH domains and the c-terminus is comprised of two identical soluble VH3 germlined based VH domains of different specificity to the N-terminal domains. Therefore, each specificity has a valence of two. Again, in this format, any of the antibody moieties at any of the four attachment/fusion points can be substituted with a non-antibody moiety, e.g., an effector binding/modulating moiety that does not comprise an antibody molecule.

[0087] FIG. 10 illustrates another example. In this example, the molecule is comprised of four VH3 germline based soluble VH domains. The first two domains have the same specificity (for example an inhibitory receptor), the 3rd domain from the N-terminus may have specificity for a tissue antigen and the fourth domain from the N-terminus may have specificity for human serum albumin (HSA), thereby granting the molecule extended half-life in the absence of an Ig Fc domain. Three glycine, serine, alanine and/or threonine rich linkers exists between domains 1 and 2, domains 2 and 3, and domains 3 and 4. This format may be configured with up to tetraspecificity, but monovalent in each case, or to have bispecificity with bivalency in each case. The order of domains can be changed. Again, in this format, any of the antibody moieties can be substituted with a non-antibody moiety, e.g., a effector binding/modulating moiety that does not comprise an antibody molecule.

[0088] FIG. 11 illustrates yet another approach. This example is similar to FIGS. 3 and 4, in that it is Fc homodimer based with two identical Fab units (bivalent monospecificity) at the N-terminus of the molecule. This example differs in that the C-terminus of each heavy chain is appended with a tandem-scFv. Thus, in each case the c-terminus of the CH3 domain of the Fc is linked via a glycine/serine/alanine/threonine based linker to the N-terminus of a first VH domain, which is linked via the C-terminus by a 12-15 amino acid glycine/serine rich linker to the N-terminus of a first VL domain, which linked via a 25-35 amino acid glycine/serine/alanine/threonine based linker at the c-terminus to the N-terminus of a second VH domain, which is linked via the c-terminus with a 12-15 amino acid glycine/serine based linker to the N-terminus of a 2nd VL domain. In this Fc homodimer based molecule there are therefore two identical tandem scFvs at the c-terminus of the molecule offering either tetravalency for a single tissue antigen for example or bivalency to two different molecules. This format could also be adapted with a heterodimer Fc core allowing two different tandem-scFvs at the c-terminus of the Fc allowing for monovalent tetraspecificity at the c-terminus while retaining either bivalent monospecificity at the N-terminus or monovalent bispecificity at the N-terminal via usage of single chain Fab configurations as in FIGS. 5, 6, and 7. This molecule can therefore be configured to have 2, 3, 4, 5, or 6 specificities. The domain order of scFvs within the tandem—scFv units may be configured to be from N to C terminus either VH-Linker-VL or VL-Linker-VH. Again, in this format, any of the antibody moieties at any of the four attachment/fusion points can be substituted with a non-antibody moiety, e.g., a effector binding/modulating moiety that does not comprise an antibody molecule.

[0089] Bi-specific antibodies can also be constructed to have, for example, shorter systemic PK while having increased tissue penetration. These types of antibodies can be based upon, for example, a human VH3 based domain antibody format. These are illustrated, for example, in FIGS. 12, 13, and 14. FIGS. 12, 13, and 14 each comprised a soluble VH3 germline family based VH domain modules. Each domain is approximately 12.5 kDa allowing for a small overall MW, which, without being bound to any particular theory, should be beneficial for enhanced tissue penetration. In these examples, none of the VH domains recognize any half-life extending targets such as FcRn or HSA. As illustrated in FIG. 12, the molecule is comprised of two VH domains joined with a flexible hydrophilic glycine/serine based linker between the C-terminus of the first domain and N-terminus of the second domain. In this example one domain may recognize a T cell co-stimulatory receptor and the second may recognize a tissue tethering antigen. As illustrated in FIG. 13, the molecule is comprised of three VH domains with N—C terminal linkages of hydrophilic glycine/serine based linkers. The molecule may be configured to be trispecific but monovalent for each target. It may be bispecific with bivalency for one target and monovalency for another. As illustrated in FIG. 14, the molecule is comprised of four VH domains with N—C terminal Glycine/Serine rich linkers between each domain. This molecule may be configured to be tetraspecific, trispecific, or bispecific with varying antigenic valencies in each case. Again, in this format, any of the antibody moieties at can be substituted with a non-antibody moiety, e.g., a effector binding/modulating moiety that does not comprise an antibody molecule.

[0090] Other embodiments of bi-specific antibodies are illustrated in FIGS. 15 and 16. FIGS. 15 and 16 are comprised of the naturally heterodimerizing core of the human IgG CH1/Ckappa interface, including the c-terminal heavy/light disulfide bond which covalently anchors the interaction. This format does not contain an Fc or any moieties for half-life extension. As illustrated in FIG. 15, the molecule, at the N-terminus of the constant kappa domain is appended with an scFv fragment consisting of an N-terminal VH domain, linked at its C-terminus to the N-terminus of a VL domain via a 12-15 amino acid gly/ser based linker, which is linked by its C-terminus to the N-terminus of the constant kappa domain via the native VL-Ckappa elbow sequence. The CH1 domain is appended at the N-terminus with an scFv fragment consisting of an N-terminal VL domain linked at its c-terminus via a 12-15 amino acid gly/ser linker to the N-terminus of a VH domain, which is linked at its c-terminus to the N-terminus of the CH1 domains via the natural VH—CH1 elbow sequence. As illustrated in FIG. 16, the molecule has the same N-terminal configuration to Example 13. However the C-terminus of the constant kappa and CH1 domains are appended with scFv modules which may be in either the VH-VL or VL-VH configuration and may be either specific for the same antigen or specific for two different antigens. The VH/VL inter-domain linkers may be 12-15 amino acids in length and consisting of gly/ser residues. The scFv binding sub-units may be swapped for soluble VH domains, or peptide recognition elements, or even tandem-scFv elements. This approach can also be configured to use variable lambda and/or constant lambda domains. Again, in this format, any of the antibody moieties at any of the attachment/fusion points can be substituted with a non-antibody moiety, e.g., a effector binding/modulating moiety that does not comprise an antibody molecule.

[0091] FIG. 17 illustrates another embodiment. FIG. 17 represents a tandem scFv format consisting of a first N-terminal VL domain linked at its C-terminus to the N-terminus of a first VH domain with a 12-15 amino acid gly/ser rich linker, followed at the first VH c-terminus by a amino acid gly/ser/ala/thr based linker to the N-terminus of a second VL domain. The second VL domain is linked at the C-terminus to the N-terminus of a 2nd VH domain by a 12-15 amino acid gly/ser linker. Each scFv recognizes a different target antigen such as a co-stimulatory T cell molecule and a tissue tethering target. Again, in this format, any of the antibody moieties can be substituted with a non-antibody moiety, e.g., a effector binding/modulating moiety that does not comprise an antibody molecule.

[0092] FIG. 18 illustrates another embodiment. FIG. 18 is a F(ab′)2 scFv fusion. This consists of two identical Fab components joined via two disulfide bonds in the native human IgG1 hinge region c-terminal of the human IgG CH1 domain. The human IgG1 CH2 and CH3 domains are absent. At the c-terminus of heavy chains 1 and 2 are two identical scFv fragments linked via a gly/ser/ala/thr rich linker to the c-terminus of the huIgG1 hinge region. In the configuration shown, the VH is N-terminal in each scFv unit and linked via a 12-15 amino acid gly/ser rich linker to the N-terminus of a VL domain. An alternative configuration would be N-term-VL-Linker-VH—C-term. In this design, the construct is bispecific with bivalency for reach target. Again, in this format, any of the antibody moieties at any of the four attachment/fusion points can be substituted with a non-antibody moiety, e.g., a effector binding/modulating moiety that does not comprise an antibody molecule.

[0093] CD39 molecule, as that term as used herein, refers to a polypeptide having sufficient CD39 sequence that, as part of a therapeutic compound, it phosphohydrolyzes ATP to AMP. In some embodiments, a CD39 molecule phosphohydrolizes ATP to AMP equivalent to, or at least, 20, 30, 40, 50, 60, 70, 80, 90, or 95% of the rate of a naturally occurring CD39, e.g., the CD39 from which the CD39 molecule was derived. In some embodiments, a CD39 molecule has at least 60, 70, 80, 90, 95, 99, or 100% sequence identity, or substantial sequence identity, with a naturally occurring CD39.

[0094] Any functional isoform can be used (with CD39 or other proteins discussed herein). Exemplary CD39 sequence include GenBank accession #NP 001767.3 or a mature form from the following sequence:

(SEQ ID NO: 1)
MEDTKESNVKTFCSKNILAILGESSIIAVIALLAVGLTONKALPENVKYG
IVLDAGSSHTSLYIYKWPAEKENDTGVVHQVEECRVKGPGISKFVQKVNE
IGIYLTDCMERAREVIPRSQHQETPVYLGATAGMRLLRMESEELADRVLD
VVERSLSNYPFDFQGARIITGQEEGAYGWITINYLLGKFSQKTRWFSIVP
YETNNQETFGALDLGGASTQVTFVPQNQTIESPDNALQFRLYGKDYNVYT
HSFLCYGKDQALWQKLAKDIQVASNEILRDPCFHPGYKKVVNVSDLYKTP
CTKRFEMTLPFQQFEIQGIGNYQQCHQSILELFNTSYCPYSQCAFNGIFL
PPLQGDFGAFSAFYFVMKFLNLTSEKVSQEKVTEMMKKFCAQPWEEIKTS
YAGVKEKYLSEYCFSGTYILSLLLQGYHFTADSWEHIHFIGKIQGSDAGW
TLGYMLNLTNMIPAEQPLSTPLSHSTYVFLMVLESLVLFTVAIIGLLIFH
KPSYFWKDMV.

[0095] In some embodiments, a CD39 molecule comprises a soluble catalytically active form of CD39 found to circulate in human or murine serum, see, e.g., Metabolism of circulating ADP in the bloodstream is mediated via integrated actions of soluble adenylate kinase-1 and NTPDase1/CD39 activities, Yegutkin et al. FASEB J. 2012 September; 26(9):3875-83. A soluble recombinant CD39 fragment is also described in Inhibition of platelet function by recombinant soluble ecto-ADPase/CD39, Gayle, et al., J Clin Invest. 1998 May 1; 101(9): 1851-1859.

[0096] CD73 molecule, as that term as used herein, refers to a polypeptide having sufficient CD73 sequence that, as part of a therapeutic compound, it dephosphorylates extracellular AMP to adenosine. In some embodiments, a CD73 molecule dephosphorylates extracellular AMP to adenosine equivalent to, or at least, 10, 20, 30, 40, 50, 60, 70, 80, 90, or 95% of the rate of a naturally occurring CD73, e.g., the CD73 from which the CD73 molecule was derived. In some embodiments, a CD73 molecule has at least 60, 70, 80, 90, 95, 99, or 100% sequence identity, or substantial sequence identity, with a naturally occurring CD73. Exemplary CD73 sequences include GenBank AAH65937.1 5′-nucleotidase, ecto (CD73) [Homo sapiens] or a mature form from the following sequence,

(SEQ ID NO: 2)
[sequence omitted]

[0097] In some embodiments, a CD73 molecule comprises a soluble form of CD73 which can be shed from the membrane of endothelial cells by proteolytic cleavage or hydrolysis of the GPI anchor by shear stress see, e.g., Reference: Yegutkin G, Bodin P, Burnstock G. Effect of shear stress on the release of soluble ecto-enzymes ATPase and 5′-nucleotidase along with endogenous ATP from vascular endothelial cells. Br J Pharmacol 2000; 129: 921-6. For CD73 function see Colgan et al., Physiological roles for ecto-5′-nucleotidase (CD73), Purinergic Signalling, June 2006, 2:351.

[0098] Cell surface molecule binder, as that term is used herein, refers to a molecule, typically a polypeptide, that binds, e.g., specifically, to a cell surface molecule on a cell, e.g., an immunosuppressive immune cell, e.g., a Treg. In some embodiments, the cell surface binder has sufficient sequence from a naturally occurring ligand of the cell surface molecule, that it can specifically bind the cell surface molecule (a cell surface molecule ligand). In some embodiments, the cell surface binding is an antibody molecule that binds, e.g., specifically binds, the cell surface molecule.

[0099] Donor specific targeting moiety, as that term is used herein, refers to a moiety, e.g., an antibody molecule, that as a component of a therapeutic compound, localizes the therapeutic compound preferentially to an implanted donor tissue, as opposed to tissue of a recipient. As a component of a therapeutic compound, the donor specific targeting moiety provides site-specific immune privilege for a transplant tissue, e.g., an organ, from a donor.

[0100] In some embodiments, a donor specific targeting moiety it binds to the product, e.g., a polypeptide product, of an allele present at a locus, which allele is not present at the locus in the (recipient) subject. In some embodiments, a donor specific targeting moiety binds to an epitope on product, which epitope is not present in the (recipient) subject.

[0101] In some embodiments, a donor specific targeting moiety, as a component of a therapeutic compound, preferentially binds to a donor target or antigen, e.g., has a binding affinity for the donor target that is greater for donor antigen or tissue, e.g., at least 2, 4, 5, 10, 50, 100, 500, 1,000, 5,000, or 10,000 fold greater, than its affinity for than for subject antigen or tissue. In some embodiments, a donor specific targeting moiety, has a binding affinity for a product of an allele of a locus present in donor tissue (but not present in the subject) at least 2, 4, 5, 10, 50, 100, 500, 1,000, 5,000, or 10,000 fold greater, than its affinity for the product of the allele of the locus present in the subject (which allele is not present in donor tissue). Affinity of a therapeutic compound of which the donor specific moiety is a component, can be measured in a cell suspension, e.g., the affinity for suspended cells having the allele is compared with its affinity for suspended cells not having the allele. In some embodiments, the binding affinity for the donor allele cells is below 10 nM. In some embodiments, the binding affinity for the donor allele cells is below 100 pM, 50 pM, or 10 pM.

[0102] In some embodiments, the specificity for a product of a donor allele is sufficient that when the donor specific targeting moiety is coupled to an immune-down regulating effector: i) immune attack of the implanted tissue, e.g., as measured by histological inflammatory response, infiltrating T effector cells, or organ function, in the clinical setting—e.g. creatinine for the kidney, is substantially reduced, e.g., as compared to what would be seen in an otherwise similar implant but lacking the donor specific targeting moiety is coupled to an immune-down regulating effector; and/or ii) immune function in the recipient, outside or away from the implanted tissue, is substantially maintained. In some embodiments, one or more of the following is seen: at therapeutic levels of therapeutic compound, peripheral blood lymphocyte counts are not substantially impacted, e.g., the level of T cells is within 25, 50, 75, 85, 90, or 95% of normal, the level of B cells is within 25, 50, 75, 85, 90, or 95% of normal, and/or the level of granulocytes (PMNs) cells is within 25, 50, 75, 85, 90, or 95% of normal, or the level of monocytes is within 25, 50, 75, 85, 90, or 95% of normal; at therapeutic levels of therapeutic compound, the ex vivo proliferative function of PBMCs (peripheral blood mononuclear cells) against non-disease relevant antigens is substantially normal or is within 70, 80, or 90% of normal; at therapeutic levels of therapeutic compound, the incidence or risk of risk of opportunistic infections and cancers associated with immunosuppression is not substantially increased over normal; or at therapeutic levels of therapeutic compound, the incidence or risk of risk of opportunistic infections and cancers associated with immunosuppression is substantially less than would be seen with standard of care, or non-targeted, immunosuppression. In some embodiments, the donor specific targeting moiety comprises an antibody molecule, a target specific binding polypeptide, or a target ligand binding molecule.

[0103] Elevated risk, as used herein, refers to the risk of a disorder in a subject, wherein the subject has one or more of a medical history of the disorder or a symptom of the disorder, a biomarker associated with the disorder or a symptom of the disorder, or a family history of the disorder or a symptom of the disorder.

[0104] Functional antibody molecule to an effector or inhibitory immune checkpoint molecule, as that term is used herein, refers to an antibody molecule that when present as the ICIM binding/modulating moiety of a multimerized therapeutic compound, can bind and agonize the effector or inhibitory immune checkpoint molecule. In some embodiments, the anti-effector or inhibitory immune checkpoint molecule antibody molecule, when binding as a monomer (or binding when the therapeutic compound is not multimerized), to the effector or inhibitory immune checkpoint molecule, does not antagonize, substantially antagonize, prevent binding, or prevent substantial binding, of an endogenous counter ligand of the inhibitory immune checkpoint molecule to inhibitory immune checkpoint molecule. In some embodiments, the anti-effector or inhibitory immune checkpoint molecule antibody molecule when binding as a monomer (or binding when the therapeutic compound is not multimerized), to the inhibitory immune checkpoint molecule, does not agonize or substantially agonize, the effector or inhibitory molecule.

[0105] ICIM binding/modulating moiety, as that term is used herein, refers to an effector binding/modulating moiety that, as part of a therapeutic compound, binds and agonizes a cell surface inhibitory molecule, e.g., an inhibitory immune checkpoint molecule, e.g., PD-1, or binds or modulates cell signaling, e.g., binds a FCRL, e.g., FCRL1-6, or binds and antagonizes a molecule that promotes immune function.

[0106] IIC binding/modulating moiety, as that term is used herein, refers to an effector binding/modulating moiety that, as part of a therapeutic compound, binds an immunosuppressive immune cell. In some embodiments, the IIC binding/modulating moiety increases the number or concentration of an immunosuppressive immune cell at the binding site.

[0107] ICSM binding/modulating moiety, as that term is used herein, refers to an effector binding/modulating moiety that antagonizes an immune stimulatory effect of a stimulatory, e.g., co-stimulatory, binding pair. A stimulatory or co-stimulatory binding pair, as that term is used herein, comprises two members, 1) a molecule on the surface of an immune cell; and 2) the binding partner for that cell molecule, which may be an additional immune cell, or a non-immune cell. Ordinarily, upon binding of one member to the other, assuming other requirements are met, the member on the immune cell surfaces stimulates the immune cell, e.g., a costimulatory molecule, and an immune response is promoted. In situations where the costimulatory molecule and the costimulatory molecule counter structure are both expressed on immune cells, bi-directional activation of both cells may occur. In an embodiment an ICSM binding/modulating moiety binds and antagonizes the immune cell expressed member of a binding pair. For example, it binds and antagonizes OX40. In another embodiment, an ICSM binding/modulating moiety binds and antagonizes the member of the binding pair that itself binds the immune cell expressed member, e.g., it binds and antagonizes OX40L. In either case, inhibition of stimulation or co-stimulation of an immune cell is achieved. In an embodiment the ICSM binding/modulating moiety decreases the number or the activity of an immunostimulating immune cell at the binding site.

### Inhibitory Immune Checkpoint Molecules

[0108] An “inhibitory immune checkpoint molecule ligand molecule,” as that term is used herein, refers to a polypeptide having sufficient inhibitory immune checkpoint molecule ligand sequence, e.g., in the case of a PD-L1 molecule, sufficient PD-L1 sequence, that when present as an ICIM binding/modulating moiety of a multimerized therapeutic compound, can bind and agonize its cognate inhibitory immune checkpoint molecule, e.g., again in the case of a PD-L1 molecule, PD-1.

[0109] In some embodiments, the inhibitory immune checkpoint molecule ligand molecule, e.g., a PD-L1 molecule, when binding as a monomer (or binding when the therapeutic compound is not multimerized), to its cognate ligand, e.g., PD-1, does not antagonize or substantially antagonize, or prevent binding, or prevent substantial binding, of an endogenous inhibitory immune checkpoint molecule ligand to the inhibitory immune checkpoint molecule. E.g., in the case of a PD-L1 molecule, the PD-L1 molecule does not antagonize binding of endogenous PD-L1 to PD-1.

[0110] In some embodiments, the inhibitory immune checkpoint molecule ligand when binding as a monomer, to its cognate inhibitory immune checkpoint molecule does not agonize or substantially agonize the inhibitory immune checkpoint molecule. By way of example, e.g., a PD-L1 molecule when binding to PD-1, does not agonize or substantially agonize PD-1.

[0111] In some embodiments, an inhibitory immune checkpoint molecule ligand molecule has at least 60, 70, 80, 90, 95, 99, or 100% sequence identity, or substantial sequence identity, with a naturally occurring inhibitory immune checkpoint molecule ligand.

[0112] Exemplary inhibitory immune checkpoint molecule ligand molecules include: a PD-L1 molecule, which binds to inhibitory immune checkpoint molecule PD-1, and in embodiments has at least 60, 70, 80, 90, 95, 99, or 100% sequence identity, or substantial sequence identity, with a naturally occurring PD-L1, e.g., the PD-L1 molecule comprising the sequence of MRIFAVFIFMTYWHLLNAFTVTVPKDLYVVEYGSNMTIECKFPVEKQLDLAALIVYWE MEDKNIIQFVHGEEDLKVQHSSYRQRARLLKDQLSLGNAALQITDVKLQDAGVYRCMI SYGGADYKRITVKVNAPYNKINQRILVVDPVTSEHELTCQAEGYPKAEVIWTSSDHQVL SGKTTTTNSKREEKLFNVTSTLRINTTTNEIFYCTFRRLDPEENHTAELVIPELPLAHPPNE RTHLVILGAILLCLGVALTFIFRLRKGRMMDVKKCGIQDTNSKKQSDTHLEET (SEQ ID NO: 3), or an active fragment thereof; in some embodiments, the active fragment comprises residues 19 to 290 of the PD-L1 sequence; a HLA-G molecule, which binds to any of inhibitory immune checkpoint molecules KIR2DL4, LILRB1, and LILRB2, and in embodiments has at least 60, 70, 80, 90, 95, 99, or 100% sequence identity, or substantial sequence identity, with a naturally occurring HLA-G. Exemplary HLA-G sequences include, e.g., a mature form found in the sequence at GenBank P17693.1 RecName: Full=HLA class I histocompatibility antigen, alpha chain G; AltName: Full=HLA G antigen; AltName: Full=MHC class I antigen G; Flags: Precursor, or in the sequence

(SEQ ID NO: 4)
MVVMAPRTLFLLLSGALTLTETWAGSHSMRYFSAAVSRPGRGEPRFIAM
GYVDDTQFVRFDSDSACPRMEPRAPWVEQEGPEYWEEETRNTKAHAQTD
RMNLQTLRGYYNQSEASSHTLQWMIGCDLGSDGRLLRGYEQYAYDGKDY
LALNEDLRSWTAADTAAQISKRKCEAANVAEQRRAYLEGTCVEWLHRYL
ENGKEMLQRADPPKTHVTHHPVFDYEATLRCWALGFYPAEIILTWQRDG
EDQTQDVELVETRPAGDGTFQKWAAVVVPSGEEQRYTCHVQHEGLPEPL
MLRWKQSSLPTIPIMGIVA.

[0113] Inhibitory molecule counter ligand molecule, as that term is used herein, refers to a polypeptide having sufficient inhibitory molecule counter ligand sequence such that when present as the ICIM binding/modulating moiety of a multimerized therapeutic compound, can bind and agonize a cognate inhibitory molecule. In some embodiments, the inhibitory molecule counter ligand molecule, when binding as a monomer (or binding when the therapeutic compound is not multimerized), to the inhibitory molecule, does not antagonize, substantially antagonize, prevent binding, or prevent substantial binding, of an endogenous counter ligand of the inhibitory molecule to the inhibitory molecule. In some embodiments, the inhibitory molecule counter ligand molecule when binding as a monomer (or binding when the therapeutic compound is not multimerized), to the inhibitory molecule, does not agonize or substantially agonize, the inhibitory molecule.

[0114] Exemplary inhibitory molecules (e.g., an inhibitory immune checkpoint molecule) (together with their counter ligands) can be found in Table 1. This table lists molecules to which exemplary ICIM binding moieties can bind.

TABLE 1
Cell surface inhibitory molecules, e.g., inhibitory
immune checkpoint molecules (column A), counter ligands
(column B) and cell types affected (column C).

| A | B | C |
|---|---|---|
| PD-1 | PD-L1, PD-L2 | T cells, B cells |
| Alkaline | | |
| phosphatase | | |
| B7-H3 | Unknown | T cells |
| B7-H4 | Neuropilin 1, | T cells |
| | neuropilin 2, | |
| | Plexin4A | |
| BTLA | HVEM | T cells, B cells |
| CTLA-4 | CD80, CD86 | T cells |
| IDO1 | Tryptophan | Lymphocytes |
| TDO2 | Tryptophan | Lymphocytes |
| KIR2DL1, | HLA MHC class I | NK cells |
| KIR2DL2/3, | | |
| KIR3DL1, | | |
| KIR3DL2 | | |
| LAG3 | HLA MHC class II | T cells |
| TIM-3 | Galectin-9 | T cells |
| VISTA | Unknown | T cells, myeloid cells |
| TIGIT | CD155 | T cells |
| KIR2DL4 | HLA-G | NK cells |
| LILRB1 | HLA-G | T cells, NK cells, B cells, |
| | | monocytes, dendritic cells |
| LILRB2 | HLA-G | Monocytes, dendritic cells, |
| | | neutrophils, some tumor cells |
| NKG2A | nonclassical MHC | T cells, NK cells |
| | glycoproteins class I | |
| FCRL1-6 | FCRL1 - 2 not | B cells |
| | known | |
| | FCRL4 = IgA | |
| | FCRL5 = IgG | |
| | FCRL6 = MHC Class | |
| | II | |
| | BUTYROPHILINS, | Modulation of immune cells |
| | for example | |
| | BTN1A1, BTN2A2, | |
| | BTNL2, BTNL1, | |
| | BTNL8 | |

[0115] Sequence identity, percentage identity, and related terms, as those terms are used herein, refer to the relatedness of two sequences, e.g., two nucleic acid sequences or two amino acid or polypeptide sequences. In the context of an amino acid sequence, the term “substantially identical” is used herein to refer to a first amino acid that contains a sufficient or minimum number of amino acid residues that are i) identical to, or ii) conservative substitutions of aligned amino acid residues in a second amino acid sequence such that the first and second amino acid sequences can have a common structural domain and/or common functional activity. For example, amino acid sequences that contain a common structural domain having at least about 85%, 90%. 91%, 92%, 93%, 94%, 95%, 96%, 97%, 98% or 99% identity to a reference sequence, e.g., a sequence provided herein.

[0116] In the context of nucleotide sequence, the term “substantially identical” is used herein to refer to a first nucleic acid sequence that contains a sufficient or minimum number of nucleotides that are identical to aligned nucleotides in a second nucleic acid sequence such that the first and second nucleotide sequences encode a polypeptide having common functional activity, or encode a common structural polypeptide domain or a common functional polypeptide activity. For example, nucleotide sequences having at least about 85%, 90%, 91%, 92%, 93%, 94%, 95%, 96%, 97%, 98% or 99% identity to a reference sequence, e.g., a sequence provided herein.

[0117] The term “functional variant” refers to polypeptides that have a substantially identical amino acid sequence to the naturally-occurring sequence, or are encoded by a substantially identical nucleotide sequence, and are capable of having one or more activities of the naturally-occurring sequence.

[0118] Calculations of homology or sequence identity between sequences (the terms are used interchangeably herein) are performed as follows.

[0119] To determine the percent identity of two amino acid sequences, or of two nucleic acid sequences, the sequences are aligned for optimal comparison purposes (e.g., gaps can be introduced in one or both of a first and a second amino acid or nucleic acid sequence for optimal alignment and non-homologous sequences can be disregarded for comparison purposes). In a preferred embodiment, the length of a reference sequence aligned for comparison purposes is at least 30%, preferably at least 40%, more preferably at least 50%, 60%, and even more preferably at least 70%, 80%, 90%, 100% of the length of the reference sequence. The amino acid residues or nucleotides at corresponding amino acid positions or nucleotide positions are then compared. When a position in the first sequence is occupied by the same amino acid residue or nucleotide as the corresponding position in the second sequence, then the molecules are identical at that position (as used herein amino acid or nucleic acid “identity” is equivalent to amino acid or nucleic acid “homology”).

[0120] The percent identity between the two sequences is a function of the number of identical positions shared by the sequences, taking into account the number of gaps, and the length of each gap, which need to be introduced for optimal alignment of the two sequences.

[0121] The comparison of sequences and determination of percent identity between two sequences can be accomplished using a mathematical algorithm. In a preferred embodiment, the percent identity between two amino acid sequences is determined using the Needleman and Wunsch ((1970) J. Mol. Biol. 48:444-453) algorithm which has been incorporated into the GAP program in the GCG software package (available at http://www.gcg.com), using either a Blossum 62 matrix or a PAM250 matrix, and a gap weight of 16, 14, 12, 10, 8, 6, or 4 and a length weight of 1, 2, 3, 4, 5, or 6. In yet another preferred embodiment, the percent identity between two nucleotide sequences is determined using the GAP program in the GCG software package (available at http://www.gcg.com), using a NWSgapdna. CMP matrix and a gap weight of 40, 50, 60, 70, or 80 and a length weight of 1, 2, 3, 4, 5, or 6. A particularly preferred set of parameters (and the one that should be used unless otherwise specified) are a Blossum 62 scoring matrix with a gap penalty of 12, a gap extend penalty of 4, and a frameshift gap penalty of 5.

[0122] The percent identity between two amino acid or nucleotide sequences can be determined using the algorithm of E. Meyers and W. Miller ((1989) CABIOS, 4:11-17) which has been incorporated into the ALIGN program (version 2.0), using a PAM120 weight residue table, a gap length penalty of 12 and a gap penalty of 4.

[0123] The nucleic acid and protein sequences described herein can be used as a “query sequence” to perform a search against public databases to, for example, identify other family members or related sequences. Such searches can be performed using the NBLAST and) (BLAST programs (version 2.0) of Altschul, et al. (1990) J. Mol. Biol. 215:403-10. BLAST nucleotide searches can be performed with the NBLAST program, score=100, wordlength=12 to obtain nucleotide sequences homologous to for example any a nucleic acid sequence provided herein. BLAST protein searches can be performed with the)(BLAST program, score=50, wordlength=3 to obtain amino acid sequences homologous to protein molecules provided herein. To obtain gapped alignments for comparison purposes, Gapped BLAST can be utilized as described in Altschul et al., (1997) Nucleic Acids Res. 25:3389-3402. When utilizing BLAST and Gapped BLAST programs, the default parameters of the respective programs (e.g.,)(BLAST and NBLAST) can be used. See http://www.ncbi.nlm.nih.gov.

[0124] As used herein, the term “hybridizes under low stringency, medium stringency, high stringency, or very high stringency conditions” describes conditions for hybridization and washing. Guidance for performing hybridization reactions can be found in Current Protocols in Molecular Biology, John Wiley & Sons, N.Y. (1989), 6.3.1-6.3.6, which is incorporated by reference. Aqueous and nonaqueous methods are described in that reference and either can be used. Specific hybridization conditions referred to herein are as follows: 1) low stringency hybridization conditions in 6× sodium chloride/sodium citrate (SSC) at about 45° C., followed by two washes in 0.2×SSC, 0.1% SDS at least at 50° C. (the temperature of the washes can be increased to 55° C. for low stringency conditions); 2) medium stringency hybridization conditions in 6×SSC at about 45° C., followed by one or more washes in 0.2×SSC, 0.1% SDS at 60° C.; 3) high stringency hybridization conditions in 6×SSC at about 45° C., followed by one or more washes in 0.2×SSC, 0.1% SDS at 65° C.; and preferably 4) very high stringency hybridization conditions are 0.5 M sodium phosphate, 7% SDS at 65° C., followed by one or more washes at SSC, 1% SDS at 65° C. Very high stringency conditions (4) are the preferred conditions and the ones that should be used unless otherwise specified.

[0125] It is understood that the molecules and compounds of the present embodiments may have additional conservative or non-essential amino acid substitutions, which do not have a substantial effect on their functions.

[0126] The term “amino acid” is intended to embrace all molecules, whether natural or synthetic, which include both an amino functionality and an acid functionality and capable of being included in a polymer of naturally-occurring amino acids. Exemplary amino acids include naturally-occurring amino acids; analogs, derivatives and congeners thereof; amino acid analogs having variant side chains; and all stereoisomers of any of any of the foregoing. As used herein the term “amino acid” includes both the D- or L-optical isomers and peptidomimetics. A “conservative amino acid substitution” is one in which the amino acid residue is replaced with an amino acid residue having a similar side chain. Families of amino acid residues having similar side chains have been defined in the art. These families include amino acids with basic side chains (e.g., lysine, arginine, histidine), acidic side chains (e.g., aspartic acid, glutamic acid), uncharged polar side chains (e.g., glycine, asparagine, glutamine, serine, threonine, tyrosine, cysteine), nonpolar side chains (e.g., alanine, valine, leucine, isoleucine, proline, phenylalanine, methionine, tryptophan), beta-branched side chains (e.g., threonine, valine, isoleucine) and aromatic side chains (e.g., tyrosine, phenylalanine, tryptophan, histidine). CD39 molecule, a CD73 molecule, a Cell surface molecule binder, Donor specific targeting moiety Effector ligand binding molecule, ICIM binding/modulating moiety IIC binding/modulating moiety, an inhibitory immune checkpoint molecule ligand molecule, Inhibitory molecule counter ligand molecule, SM binding/modulating moiety, or ICSM binding/modulating moiety.

[0127] SM binding/modulating moiety, as that term is used herein, refers to an effector binding/modulating moiety that, as part of a therapeutic compound, promotes an immuno-suppressive local microenvironment, e.g., by providing in the proximity of the target, a substance that inhibits or minimizes attack by the immune system of the target. In some embodiments, the SM binding/modulating moiety comprises, or binds, a molecule that inhibits or minimizes attack by the immune system of the target. In some embodiments, a therapeutic compound comprises an SM binding/modulating moiety that binds and accumulates a soluble substance, e.g., an endogenous or exogenous substance, having immunosuppressive function. In some embodiments, a therapeutic compound comprises an SM binding/modulating moiety that binds and inhibits, sequesters, degrades or otherwise neutralizes a substance, e.g., a soluble substance, typically and endogenous soluble substance, that promotes immune attack. In some embodiments, a therapeutic compound comprises an SM binding/modulating moiety that comprises an immune-suppressive substance, e.g. a fragment of protein known to be immunosuppressive. By way of example, an effector molecule binding moiety that binds, or comprises, a substance e.g., a CD39 molecule or a CD73 molecule, that depletes a component, that promotes immune effector cell function, e.g., ATP or AMP.

[0128] Specific targeting moiety, as that term is used herein, refers to donor specific targeting moiety or a tissue specific targeting moiety.

[0129] Target ligand binding molecule, as used herein, refers to a polypeptide that has sufficient sequence from a naturally occurring counter-ligand of a target ligand that it can bind the target ligand on a target tissue (e.g., donor tissue or subject target tissue) with sufficient specificity that it can serve as a specific targeting moiety. In some embodiments, it binds to target tissue or cells with at least 10, 20, 30, 40, 50, 60, 70, 80, 90, or 95% of the affinity of the naturally occurring counter-ligand. In some embodiments, it has at least 60, 70, 80, 90, 95, 99, or 100% sequence identity, or substantial sequence identity, with a naturally occurring counter-ligand for the target ligand.

[0130] Target site, as that term is used herein, refers to a site which contains the entity, e.g., epitope, bound by a targeting moiety. In some embodiments, the target site is the site at which immune privilege is established.

[0131] Tissue specific targeting moiety, as that term is used herein, refers to a moiety, e.g., an antibody molecule, that as a component of a therapeutic molecule, localizes the therapeutic molecule preferentially to a target tissue, as opposed to other tissue of a subject. As a component of a therapeutic compound, the tissue specific targeting moiety provides site-specific immune privilege for a target tissue, e.g., an organ or tissue undergoing or at risk for autoimmune attack. In some embodiments, a tissue specific targeting moiety binds to a product, e.g., a polypeptide product, which is not present outside the target tissue, or is present at sufficiently low levels that, at therapeutic concentrations of therapeutic molecule, unacceptable levels of immune suppression are absent or substantially absent. In some embodiments, a tissue specific targeting moiety binds to an epitope, which epitope is not present outside, or not substantially present outside, the target site.

[0132] In some embodiments, a tissue specific targeting moiety, as a component of a therapeutic compound, preferentially binds to a target tissue or target tissue antigen, e.g., has a binding affinity for the target tissue or antigen that is greater for target antigen or tissue, e.g., at least 2, 4, 10, 50, 100, 500, 1,000, 5,000, or 10,000 fold greater, than its affinity for than for non-target tissue or antigen present outside the target tissue. Affinity of a therapeutic compound of which the tissue specific moiety is a component, can be measured in a cell suspension, e.g., the affinity for suspended cells having the target antigen is compared with its affinity for suspended cells not having the target antigen. In some embodiments, the binding affinity for the target antigen bearing cells is below 10 nM.

[0133] In some embodiments, the binding affinity for the target antigen bearing cells is below 100 pM, 50 pM, or 10 pM. In some embodiments, the specificity for a target antigen is sufficient, that when the tissue specific targeting moiety is coupled to an immune-down regulating effector: i) immune attack of the target tissue, e.g., as measured by histological inflammatory response, infiltrating T effector cells, or organ function, in the clinical setting—e.g. creatinine for kidney, is substantially reduced, e.g., as compared to what would be seen in an otherwise similar implant but lacking the tissue specific targeting moiety is coupled to an immune-down regulating effector; and/or ii) immune function in the recipient, outside or away from the target tissue, is substantially maintained.

[0134] In some embodiments, one or more of the following is seen: at therapeutic levels of therapeutic compound, peripheral blood lymphocyte counts are not substantially impacted, e.g., the level of T cells is within 25, 50, 75, 85, 90, or 95% of normal, the level of B cells is within 50, 75, 85, 90, or 95% of normal, and/or the level of granulocytes (PMNs) cells is within 25, 75, 85, 90, or 95% of normal, or the level of monocytes is within 25, 50, 75, 85, 90, or 95% of normal 1; at therapeutic levels of therapeutic compound, the ex vivo proliferative function of PBMCs (peripheral blood mononuclear cells) against non-disease relevant antigens is substantially normal or is within 70, 80, or 90% of normal; at therapeutic levels of therapeutic compound, the incidence or risk of risk of opportunistic infections and cancers associated with immunosuppression is not substantially increased over normal; or at therapeutic levels of therapeutic compound, the incidence or risk of risk of opportunistic infections and cancers associated with immunosuppression is substantially less than would be seen with standard of care, or non-targeted, immunosuppression. In some embodiments, the tissue specific targeting moiety comprises an antibody molecule. In some embodiments, the donor specific targeting moiety comprises an antibody molecule, a target specific binding polypeptide, or a target ligand binding molecule. In some embodiments, the tissue specific targeting moiety binds a product, or a site on a product, that is present or expressed exclusively, or substantially exclusively, on target tissue.

ICIM Binding/Modulating Moieties: Effector Binding/Modulating Moieties that Bind Inhibitory Receptors

[0135] Methods and compounds described herein provide for a therapeutic compound having an effector binding/modulating moiety comprising an ICIM binding/modulating moiety, that directly binds and activates an inhibitory receptor on the surface of an immune cell, e.g., to reduce or eliminate, or substantially eliminate, the ability of the immune cell to mediate immune attack. Coupling of the ICIM binding/modulating moiety to a targeting entity, promotes site-specific or local down regulation of the immune cell response, e.g., confined substantially to the locations having binding sites for the targeting moiety. Thus, normal systemic immune function is substantially retained. In some embodiments, an ICIM binding/modulating moiety comprises an inhibitory immune checkpoint molecule counter ligand molecule, e.g., a natural ligand, or fragment of a natural ligand (e.g., PD-L1 or HLA-G) of the inhibitory immune checkpoint molecule. In some embodiments, an ICIM binding/modulating moiety comprises a functional antibody molecule, e.g., a functional antibody molecule comprising an scFv binding domain, that engages inhibitory immune checkpoint molecule.

[0136] In some embodiments, the ICIM binding/modulating moiety, comprising, e.g., a functional antibody molecule, or inhibitory immune checkpoint molecule ligand molecule, binds the inhibitory receptor but does not prevent binding of a natural ligand of the inhibitory receptor to the inhibitory receptor. In embodiments a format is used wherein a targeting moiety is coupled, e.g., fused, to an ICIM binding/modulating moiety, comprising, e.g., an scFv domain, and configured so that upon binding of an inhibitory receptor while in solution (e.g., in blood or lymph) (and presumably in a monomeric format), the therapeutic molecule: i) fails to agonize, or fails to substantially agonize (e.g., agonizes at less than 30, 20, 15, 10, or 5% of the level seen with a full agonizing molecule) the inhibitory receptor on the immune cell; and/or ii) fails to antagonize, or fails to substantially antagonize (e.g., antagonizes at less than 30, 20, 15, 10, or 5% of the level seen with a full antagonizing molecule) the inhibitory receptor on the immune cell. A candidate molecule can be evaluated for its ability to agonize or not agonize by its ability to either increase or decrease the immune response in an in vitro cell based assay wherein the target is not expressed, e.g., using an MLR-based assay (mixed lymphocyte reaction).

[0137] In some embodiments, candidate ICIM binding/modulating moieties can reduce, completely or substantially eliminate systemic immunosuppression and systemic immune activation. In some embodiments, the targeting domain of the therapeutic compound, when bound to target, will serve to cluster or multimerize the therapeutic compound on the surface of the tissue desiring immune protection. In some embodiments, the ICIM binding/modulating moiety, e.g., an ICIM binding/modulating moiety comprising a scFv domain, requires a clustered or multimeric state to be able to deliver an agonistic and immunosuppressive signal, or substantial levels of such signal, to local immune cells. This type of therapeutic can, for example, provide to a local immune suppression whilst leaving the systemic immune system unperturbed or substantially unperturbed. That is, the immune suppression is localized to where the suppression is needed as opposed to being systemic and not localized to a particular area or tissue type.

[0138] In some embodiments, upon binding to the target e.g., a target organ, tissue or cell type, the therapeutic compound coats the target, e.g., target organ, tissue or cell type. When circulating lymphocytes attempt to engage and destroy the target, this therapeutic will provide an ‘off’ signal only at, or to a greater extent at, the site of therapeutic compound accumulation.

[0139] A candidate therapeutic compound can be evaluated for the ability to bind, e.g., specifically bind, its target, e.g., by ELISA, a cell based assay, or surface plasmon resonance. This property should generally be maximized, as it mediates the site-specificity and local nature of the immune privilege. A candidate therapeutic compound can be evaluated for the ability to down regulate an immune cell when bound to target, e.g., by a cell based activity assay. This property should generally be maximized, as it mediates the site-specificity and local nature of the immune privilege. The level of down regulation effected by a candidate therapeutic compound in monomeric (or non-bound) form can be evaluated, e.g., by a cell based activity assay. This property should generally be minimized, as could mediate systemic down regulation of the immune system. The level of antagonism of a cell surface inhibitory molecule, e.g., an inhibitory immune checkpoint molecule, effected by a candidate therapeutic compound in monomeric (or non-bound) form can be evaluated, e.g., by, e.g., by a cell based activity assay. This property should generally be minimized, as could mediate systemic unwanted activation of the immune system. Generally, the properties should be selected and balanced to produce a sufficiently robust site specific immune privilege without unacceptable levels of non-site specific agonism or antagonism of the inhibitory immune checkpoint molecule.

### The PD-L1/PD-1 Pathway

[0140] Programmed cell death protein 1, (often referred to as PD-1) is a cell surface receptor that belongs to the immunoglobulin superfamily. PD-1 is expressed on T cells and other cell types including, but not limited to, B cells, myeloid cells, dendritic cells, monocytes, T regulatory cells, iNK T cells. PD-1 binds two ligands, PD-L1 and PD-L2, and is an inhibitory immune checkpoint molecule. Engagement with a cognate ligand, PD-L1 or PD-L2, in the context of engagement of antigen loaded MCH with the T Cell Receptor on a T cell minimizes or prevents the activation and function of T cells. The inhibitory effect of PD-1 can include both promoting apoptosis (programmed cell death) in antigen specific T-cells in lymph nodes and reducing apoptosis in regulatory T cells (suppressor T cells).

[0141] In some embodiments, a therapeutic compound comprises an ICIM binding/modulating moiety which agonizes PD-1 inhibition. An ICIM binding/modulating moiety can include an inhibitory molecule counter ligand molecule, e.g., comprising a fragment of a ligand of PD-1 (e.g., a fragment of PD-L1 or PD-L2) or another moiety, e.g., a functional antibody molecule, comprising, e.g., an scFv domain that binds PD-1.

[0142] In some embodiments, a therapeutic compound comprises a targeting moiety that is preferentially binds a donor antigen not present in, present in substantially lower levels in the subject, e.g., a donor antigen from Table 2, and is localized to donor graft tissue in a subject. In some embodiments, it does not bind, or does not substantially bind, other tissues. In some embodiments, a therapeutic compound can include a targeting moiety that is specific for HLA-A2 and specifically binds donor allograft tissue but does not bind, or does not substantially bind, host tissues. In some embodiments, the therapeutic compound comprises an ICIM binding/modulating moiety, e.g., an inhibitory molecule counter ligand molecule, e.g., comprising a fragment of a ligand of PD-1 (e.g., a fragment of PD-L1 or PD-L2) or another moiety, e.g., a functional antibody molecule, comprising, e.g., an scFv domain that binds PD-1, such that the therapeutic compound, e.g., when bound to target, activates PD-1. The therapeutic compound targets an allograft and provides local immune privilege to the allograft.

[0143] In some embodiments, a therapeutic compound comprises a targeting moiety that is preferentially binds to an antigen of Table 2, and is localized to the target in a subject, e.g., a subject having an autoimmune disorder, e.g., an autoimmune disorder of Table 2. In some embodiments, it does not bind, or does not substantially bind, other tissues. In some embodiments, the therapeutic compound comprises an ICIM binding/modulating moiety, e.g., an inhibitory molecule counter ligand molecule, e.g., comprising a fragment of a ligand of PD-1 (e.g., a fragment of PD-L1 or PD-L2) or another moiety, e.g., a functional antibody molecule, comprising, e.g., an scFv domain that binds PD-1, such that the therapeutic compound, e.g., when bound to target, activates PD-1. The therapeutic compound targets a tissue subject to autoimmune attack and provides local immune privilege to the tissue.

[0144] PD-L1 and PDL2, or polypeptides derived therefrom, can provide candidate ICIM binding moieties. However, in monomer form, e.g., when the therapeutic compound is circulating in blood or lymph, this molecule could have an undesired effect of antagonizing the PD-L1/PD-1 pathway, and may only agonize the PD-1 pathway when clustered or multimerized on the surface of a target, e.g., a target organ. In some embodiments, a therapeutic compound comprises an ICIM binding/modulating moiety comprising a functional antibody molecule, e.g., a scFv domain, that is inert, or substantially inert, to the PD-1 pathway in a soluble form but which agonizes and drives an inhibitory signal when multimerized (by the targeting moiety) on the surface of a tissue.

### The HLA-G: KIR2DL4/LILRB1/LILRB2 Pathway

[0145] KIR2DL4, LILRB1, and LILRB2 are inhibitory molecules found on T cells, NK cells, and myeloid cells. HLA-G is a counter ligand for each.

[0146] KIR2DL4 is also known as CD158D, G9P, KIR-103AS, KIR103, KIR103AS, KIR, KIR-2DL4, killer cell immunoglobulin like receptor, and two Ig domains and long cytoplasmic tail 4. LILRB1 is also known as LILRB1, CD85J, ILT-2, ILT2, LIR-1, LIR1, MIR-7, MIR7, PIR-B, PIRB, leukocyte immunoglobulin like receptor B1. LILRB2 is also known as CD85D, ILT-4, LIR-2, LIR2, MIR-10, MIR10, and ILT4.

[0147] A therapeutic compound comprising an HLA-G molecule can be used to provide inhibitory signals to an immune cell comprising any of KIR2DL4, LILRB1, and LILRB2, e.g., with multimerized therapeutic compound molecules comprising an HLA-G molecule and thus provide site-specific immune privilege.

[0148] A therapeutic compound comprising an agonistic anti-KIR2DL4, anti-LILRB1, or anti-LILRB2 antibody molecule can be used to provide inhibitory signals to an immune cell comprising any of KIR2DL4, LILRB1, and LILRB2.

[0149] HLA-G only delivers an inhibitory signal when multimerized, for example, when expressed on the surface of a cell or when conjugated to the surface of a bead. In embodiments, a therapeutic compound comprising an HLA-G molecule which therapeutic compound does not multimerize in solution (or does not multimerize sufficiently to result in significant levels of inhibitory molecule agonization), is provided. The use of HLA-G molecules that minimize multimerization in solution will minimize systemic agonization of immune cells and unwanted immune suppression.

[0150] While not wishing to be bound by theory it is believed that HLA-G is not effective in down regulation unless multimerized, that binding of the therapeutic compound to target, through the targeting moiety, multimerizes the ICIM binding entity, and that the multimerized ICIM binding entity, binds and clusters inhibitory molecules on the surface of an immune cell, thus mediating a negative signal that down regulates the immune cell. Thus, infiltrating immune cells attempting to damage the target tissue, including antigen presenting cells and other myeloid cells, NK cells and T cells, are down regulated.

[0151] While HLA-G molecules minimize antagonism when in monomeric form are desirable, the redundancy of LILRB1 and LILRB2 will minimize, the impact on systemic even with some monomeric antagonism.

[0152] In some embodiments, the therapeutic compound comprises an ICIM binding/modulating moiety that comprises a HLA-G molecule, e.g., an B2 M-free isoform (e.g., HLA-G5), see Carosella et al., Advances in Immunology, 2015, 127:33. In a B2 M-free format, HLA-G preferentially binds LILRB2.

[0153] Suitable sequences for the construction of HLA-G molecules include GenBank P17693.1 RecName: Full=HLA class I histocompatibility antigen, alpha chain G; AltName: Full=HLA G antigen; AltName: Full=MHC class I antigen G; Flags: Precursor, or MVVMAPRTLFLLLSGALTLTETWAGSHSMRYFSAAVSRPGRGEPRFIAMGYVDDTQFV RFDSDSACPRMEPRAPWVEQEGPEYWEEETRNTKAHAQTDRMNLQTLRGYYNQSEAS SHTLQWMIGCDLGSDGRLLRGYEQYAYDGKDYLALNEDLRSWTAADTAAQISKRKCE AANVAEQRRAYLEGTCVEWLHRYLENGKEMLQRADPPKTHVTHHPVEDYEATLRCW ALGFYPAEIILTWQRDGEDQTQDVELVETRPAGDGTFQKWAAVVVPSGEEQRYTCHVQ HEGLPEPLMLRWKQSSLPTIPIIVIGIVAGLVVLAAVVTGAAVAAVLWRKKSSD (SEQ ID NO: 5). A candidate HLA-G molecule can be tested for suitability for use in methods and compounds, e.g., by methods analogous to those described in “Synthetic HLA-G proteins for therapeutic use in transplantation,” LeMaoult et al., 2013 The FASEB Journal 27:3643.

[0154] In some embodiments, a therapeutic compound comprises a targeting moiety that is preferentially binds a donor antigen not present in, present in substantially lower levels in the subject, e.g., a donor antigen from Table 2, and is localized to donor graft tissue in a subject. In some embodiments, it does not bind, or does not substantially bind, other tissues. In some embodiments, a therapeutic compound can include a targeting moiety that is specific for HLA-A2 and specifically binds a donor allograft but does not bind host tissues and is combined with an ICIM binding/modulating moiety that comprises a HLA-G molecule that binds KIR2DL4, LILRB1, or LILRB2, such that the therapeutic compound, e.g., when bound to target, activates KIR2DL4, LILRB1, or LILRB2. The therapeutic compound targets an allograft and provides local immune privilege to the allograft.

[0155] In some embodiments, a therapeutic compound comprises a targeting moiety that is preferentially binds a tissue specific antigen, e.g., an antigen from Table 2, and is localized to the target site in a subject, e.g., a subject having an autoimmune disorder, e.g., an autoimmune disorder from Table 2. In some embodiments, it does not bind, or does not substantially bind, other tissues. In embodiments the therapeutic compound comprises an ICIM binding/modulating moiety that comprises a HLA-G molecule binds KIR2DL4, LILRB1, or LILRB2, such that the therapeutic compound, e.g., when bound to target, activates KIR2DL4, LILRB1, or LILRB2. The therapeutic compound targets an tissue subject to autoimmune attack and provides local immune privilege to the tissue.

[0156] It is likely possible to engineer a stable and soluble HLA-G-B2 M fusion protein that can also bind LILRB1. For example, the crystal structure of HLA-G was determined using HLA-G/B2 M monomers (Clements et al. 2005 PNAS 102:3360).

### FCRL Family

[0157] FCRL1-6 generally inhibit B cell activation or function. These type 1 transmembrane glycoproteins are composed of different combinations of 5 types of immunoglobulin-like domains, with each protein consisting of 3 to 9 domains, and no individual domain type conserved throughout all of the FCRL proteins. In general, FCRL expression is restricted to lymphocytes, with the primary expression in B-lymphocytes. Generally, FCRLs function to repress B-cell activation.

[0158] An ICIM binding/modulating moiety can comprise an agonistic anti-BCMA antibody molecule. In some embodiments, the therapeutic compound comprises an anti-FCRL antibody molecule and an anti-B cell receptor (BCR) antibody molecule. While not wishing to be bound be theory is believed that a therapeutic compound comprising anti-body molecules of both specificities will bring the FCRL into close proximity with the BCR and inhibit BCR signaling.

### Butyrophilins and Butyrophilin-Like Molecules

[0159] Effector binding/modulating moiety can comprise an agonist or antagonist of a butyrophilin. In some embodiments, an effector binding/modulating moiety an agonistic or functional BTN1A1 molecule, BTN2A2 molecule, BTNL2 molecule, or BTNL1 molecule.

[0160] A functional BTNXi molecule (where Xi=1A1, 2A2, L2 or L1), as that term as used herein, refers to a polypeptide having sufficient BTNXi sequence that, as part of a therapeutic compound, it inhibits T cells. In some embodiments, a BTNXi molecule has at least 60, 70, 80, 95, 99, or 100% sequence identity, or substantial sequence identity, with a naturally occurring butyrophilin or butyrophilin-like molecule.

[0161] In some embodiments, an effector binding/modulating moiety an antagonistic BTNL8 molecule.

[0162] An antagonistic BTNL8 molecule, as that term as used herein, refers to a polypeptide having sufficient BTNL8 sequence that, as part of a therapeutic compound, it inhibits the activation, proliferation, or secretion of cytokine by a resting T cell. In some embodiments, a BTNL8 molecule has at least 60, 70, 80, 90, 95, 99, or 100% sequence identity, or substantial sequence identity, with a naturally occurring butyrophilin.

[0163] Effector binding/modulating moiety can comprise an agonistic BTNL2 molecule. While not wishing to be bound by theory it is believed that agonistic BTNL2 molecules induce Treg cells.

[0164] An agonistic BTNL2 molecule as that term as used herein, refers to a polypeptide having sufficient BTNL2 sequence that, as part of a therapeutic compound, it induces Treg cells. In some embodiments, a BTNL2 molecule has at least 60, 70, 80, 90, 95, 99, or 100% sequence identity, or substantial sequence identity, with a naturally occurring butyrophilin.

[0165] In some embodiments, an effector binding/modulating moiety an antagonistic BTNL8 molecule.

IIC Binding/Modulating Moieties: Effector Binding/Modulating Moieties that Recruit Immunosuppressive T Cells

[0166] In some embodiments, a therapeutic compound comprises an effector binding/modulating moiety, e.g., an IIC binding/modulating moiety, that binds, activates, or retains immunosuppressive cells, e.g., immunosuppressive T cells, at the site mediated by the targeting moiety, providing site-specific immune privilege. The IIC binding/modulating moiety, e.g., an IIC binding/modulating moiety comprising an antibody molecule, comprising, e.g., an scFv binding domain, binds immunosuppressive cell types, e.g., Tregs, e.g., Foxp3+CD25+ Tregs. Organ, tissue or specific cell type tolerance is associated with an overwhelming increase of Tregs proximal and infiltrating the target organ; in embodiments, the methods and compounds described herein synthetically re-create and mimic this physiological state. Upon accumulation of Tregs, an immunosuppressive microenvironment is created that serves to protect the organ of interest from the immune system.

### GARP-Binders as a TREG and TGFB Targeting Molecule

[0167] GARP is a membrane protein receptor for latent TGF-beta expressed on the surface of activated Tregs (Tran et al. 2009 PNAS 106:13445 and Wang et al. 2009 PNAS 106:13439). In some embodiments, a therapeutic compound comprises an IIC binding entity that binds one or both of soluble GARP and GARP-expressing cells, such as activated human Tregs, and a targeting moiety that targets the therapeutic compound to the target tissue of interest. IIC binding/modulating moieties that comprises a GARP-Binder include, e.g., an IIC binding/modulating moiety that comprises an anti-GARP antibody molecule, e.g., an anti-GARP scFv domain. While not wishing to be bound by theory, it is believed that the therapeutic compound that comprises a GARP binder effects accumulation of GARP-expressing Tregs at the site targeted by the targeting moiety of the therapeutic compound, e.g., a transplant or site of organ injury. Again, while not wishing to be bound by theory, it is believed that a therapeutic compound that comprises a GARP binder effects can also effect accumulation of soluble GARP at site of organ injury, which will serve to bind and activate TGFB1, an immuno-suppressive cytokine, in a local manner (Fridrich et al. 2016 PLoS One 11:e0153290; doi: 10.1371/journal.pone.0153290 and Hahn et al. 2013 Blood 15:1182). Thus, an effector binding/modulating moiety that comprises a GARP binder can act as either a IIC binding/modulating moiety or an SM binding/modulating moiety.

### CTLA4 as a TREG Targeting and T Effector Cell Silencing Molecule

[0168] In some embodiments, an effector binding/modulating moiety, e.g., comprises an antibody molecule, e.g., an scFv domain, that binds CTLA4 expressed on the surface of Tregs. The therapeutic molecule accumulates or retains CTLA4+ Tregs at the target site, with local immunosuppression the consequence.

[0169] Though expressed more highly on Tregs, CTLA4 is also expressed on activated T cells. A therapeutic compound comprising an effector binding/modulating moiety, e.g., an anti-CTLA4 antibody, or a functional anti-CTLA4 antibody, can down regulate the CTLA4 expressing T cell. Thus, in a therapeutic compound comprising an effector binding/modulating moiety that binds CTLA4, the effector moiety can also act as an ICIM binding/modulating moiety.

[0170] In some embodiments, the anti-CTLA4 binder is neither antagonizing or agonizing when in monomeric format, and is only agonizing when clustered or multimerized upon binding to the target.

[0171] While not wishing to be bound by theory it is believed that the binding of the therapeutic compound, via the targeting moiety, to the target, effects multimerization of therapeutic compound. In the case of memory and activated T cells, CTLA4 bound by the effector binding/modulating moiety of the therapeutic compound, is clustered, and an inhibitory signal by engagement of CTLA4 expressed by memory and activated T cells.

[0172] In some embodiments, the anti-CTLA4 binder is neither antagonizing or agonizing when in monomeric format, and is only agonizing when clustered or multimerized upon binding to the target.

IL-2 Mutein Molecules: IL2 Receptor Binders that Activate Tregs

[0173] IL-2 mutein molecule, as that term is used herein, refers to an IL2 variant that binds with high affinity to the CD25 (IL-2R alpha chain) and with low affinity to the other IL-2R signaling components CD122 (IL-2R beta) and CD132 (IL-2R gamma). Such an IL-2 mutein molecule preferentially activates Treg cells. In embodiments, either alone, or as a component of a therapeutic compound, an IL-2 mutein activates Tregs at least 2, 5, 10, or 100 fold more than cytotoxic or effector T cells. Exemplary IL-2 mutein molecules are described in WO2010085495, WO2016/164937, US2014/0286898A1, WO2014153111A2, WO2010/085495, cytotoxic WO2016014428A2, WO2016025385A1, and US20060269515. Muteins disclosed in these references that include additional domains, e.g., an Fc domain, or other domain for extension of half-life can be used in the therapeutic compounds and methods described herein without such additional domains. In another embodiment an IIC binding/modulating moiety comprises an IL-2 mutein, or active fragment thereof, coupled, e.g., fused, to another polypeptide, e.g., a polypeptide that extends in vivo half-life, e.g., an immunoglobulin constant region, or a multimer or dimer thereof, e.g., AMG 592. In an embodiment the therapeutic compound comprises the IL-2 portion of AMG 592. In an embodiment the therapeutic compound comprises the IL-2 portion but not the immunoglobulin portion of AMG 592. In some embodiments, the mutein does not comprise a Fc region. For some IL-2 muteins, the muteins are engineered to contain a Fc region because such region has been shown to increase the half-life of the mutein. In some embodiments, the extended half-life is not necessary for the methods described and embodied herein. In some embodiments, the Fc region that is fused with the IL-2 mutein comprises a N297 mutations, such as, but not limited to, N297A. In some embodiments, the Fc region that is fused with the IL-2 mutein does not comprise a N297 mutation, such as, but not limited to, N297A.

[0174] IL-2 mutein molecules that preferentially expand or stimulate Treg cells (over cytotoxic T cells) can be used as an IIC binding/modulating moiety.

[0175] In some embodiments, IIC binding/modulating moiety comprises a IL-2 mutein molecule. As used herein, the term “IL-2 mutein molecule” or “IL-2 mutein” refers to an IL-2 variant that preferentially activates Treg cells. In some embodiments, either alone, or as a component of a therapeutic compound, an IL-2 mutein molecule activates Tregs at least 2, 5, 10, or 100 fold more than cytotoxic T cells. A suitable assay for evaluating preferential activation of Treg cells can be found in U.S. Pat. No. 9,580,486 at, for example, Examples 2 and 3, or in WO2016014428 at, for example, Examples 3, 4, and 5, each of which is incorporated by reference in its entirety. The sequence of mature IL-2 is

(SEQ ID NO: 6)
APTSSSTKKTQLQLEHLLLDLQMILNGINNYKNPKLTRMLT
FKFYMPKKATELKHLQCLEEELKPLEEVLNLAQSKNFHLRP
RDLISNINVIVLELKGSETTFMCEYADETATIVEFLNRWITFC
QSIISTLT (mature IL-2 sequence)

The immature sequence of IL-2 can be represented by

(SEQ ID NO: 15)
MYRMQLLSCIALSLALVTNSAPTSSSTKKTQLQLEHLLLDL
QMILNGINNYKNPKLTRMLTFKFYMPKKATELKHLQCLEE
ELKPLEEVLNLAQSKNFHLRPRDLISNINVIVLELKGSETTF
[sequence omitted]

[0176] In some embodiments, an IIC binding/modulating moiety comprises an IL-2 mutein, or active fragment thereof, coupled, e.g., fused, to another polypeptide, e.g., a polypeptide that extends in vivo half-life, e.g., an immunoglobulin constant region, or a multimer or dimer thereof.

[0177] An IL-2 mutein molecule can be prepared by mutating one or more of the residues of IL-2. Non-limiting examples of IL-2-muteins can be found in WO2016/164937, U.S. Pat. Nos. 9,580,486, 7,105,653, 9,616,105, 9,428,567, US2017/0051029, US2014/0286898A1, WO2014153111A2, WO2010/085495, WO2016014428A2, WO2016025385A1, and US20060269515, each of which are incorporated by reference in its entirety.

[0178] In some embodiments, the alanine at position 1 of the sequence above is deleted. In some embodiments, the IL-2 mutein molecule comprises a serine substituted for cysteine at position 125 of the mature IL-2 sequence. Other combinations of mutations and substitutions that are IL-2 mutein molecules are described in US20060269515, which is incorporated by reference in its entirety. In some embodiments, the cysteine at position 125 is also substituted with a valine or alanine. In some embodiments, the IL-2 mutein molecule comprises a V91K substitution. In some embodiments, the IL-2 mutein molecule comprises a N88D substitution. In some embodiments, the IL-2 mutein molecule comprises a N88R substitution. In some embodiments, the IL-2 mutein molecule comprises a substitution of H16 E, D84K, V91N, N88D, V91K, or V91R, any combinations thereof. In some embodiments, these IL-2 mutein molecules also comprise a substitution at position 125 as described herein. In some embodiments, the IL-2 mutein molecule comprises one or more substitutions selected from the group consisting of: T3N, T3A, L12G, L12K, L12Q, L12S, Q13G, EISA, E15G, E15S, H16A, H16D, H16G, H16K, H16 M, H16N, H16R, H16S, H16T, H16V, H16Y, L19A, L19D, L19 E, L19G, L19N, L19R, L19S, L19T, L19V, D20A, D20 E, D20H, D20I, D20Y, D20F, D20G, D20T, D20W, M23R, R81A, R81G, R81S, R81T, D84A, D84 E, D84G, D84I, D84 M, D84Q D84R, D84S, D84T, 587R, N88A, N88D, N88 E, N88I, N88F, N88G, N88 M, N88R, N88S, N88V, N88W, V91D, V91 E, V91G, V91S, I92K, I92R, E95G, and Q126. In some embodiments, the amino acid sequence of the IL-2 mutein molecule differs from the amino acid sequence set forth in mature IL-2 sequence with a C125A or C125S substitution and with one substitution selected from T3N, T3A, L12G, L12K, L12Q L125, Q13G, EISA, E15G, E15S, H16A, H16D, H16G, H16K, H16 M, H16N, H16R, H16S, H16T, H16V, H16Y, L19A, L19D, L19 E, L19G, L19N, L19R, L19S, L19T, L19V, D20A, D20 E, D20F, D20G, D20T, D20W, M23R, R81A, R81G, R81S, R81T, D84A, D84 E, D84G, D84I, D84 M, D84Q, D84R, D84S, D84T, 587R, N88A, N88D, N88 E, N88F, N88I, N88G, N88 M, N88R, N88S, N88V, N88W, V91D, V91 E, V91G, V91S, I92K, I92R, E95G, Q126I, Q126L, and Q126F. In some embodiments, the IL-2 mutein molecule differs from the amino acid sequence set forth in mature IL-2 sequence with a C125A or C125S substitution and with one substitution selected from D20H, D20I, D20Y, D20 E, D20G, D20W, D84A, D84S, H16D, H16G, H16K, H16R, H16T, H16V, I92K, I92R, L12K, L19D, L19N, L19T, N88D, N88R, N88S, V91D, V91G, V91K, and V91S. In some embodiments, the IL-2 mutein comprises N88R and/or D20H mutations.

[0179] In some embodiments, the IL-2 mutein molecule comprises a mutation in the polypeptide sequence at a position selected from the group consisting of amino acid 30, amino acid 31, amino acid 35, amino acid 69, and amino acid 74. In some embodiments, the mutation at position 30 is N30S. In some embodiments, the mutation at position 31 is Y31H. In some embodiments, the mutation at position 35 is K35R. In some embodiments, the mutation at position 69 is V69A. In some embodiments, the mutation at position 74 is Q74P. In some embodiments, the mutein comprises a V69A mutation, a Q74P mutation, a N88D or N88R mutation, and one or more of L53I, L56I, L80I, or L118I mutations. In some embodiments, the mutein comprises a V69A mutation, a Q74P mutation, a N88D or N88R mutation, and a L to I mutation selected from the group consisting of: L53I, L56I, L80I, and L118I mutation. In some embodiments, the IL-2 mutein comprises a V69A, a Q74P, a N88D or N88R mutation, and a L53I mutation. In some embodiments, the IL-2 mutein comprises a V69A, a Q74P, a N88D or N88R mutation, and a L56I mutation. In some embodiments, the IL-2 mutein comprises a V69A, a Q74P, a N88D or N88R mutation, and a L80I mutation. In some embodiments, the IL-2 mutein comprises a V69A, a Q74P, a N88D or N88R mutation, and a L118I mutation. As provided for herein, the muteins can also comprise a C125A or C125S mutation.

[0180] In some embodiments, the mutein comprises a T3A mutation. The full length IL-2 muteins provided herein may not be illustrated with a T3A or other mutations provided for herein, but such mutations can be added into the muteins provided herein as is the case for any of the other mutations illustrated herein. Accordingly, In some embodiments, the mutein comprises a T3N mutation. In some embodiments, the mutein comprises a T3A mutation. In some embodiments, the mutein comprises a L12G mutation. In some embodiments, the mutein comprises a L12K mutation. In some embodiments, the mutein comprises a L12Q mutation. In some embodiments, the mutein comprises a L12S mutation. In some embodiments, the mutein comprises a Q13G mutation. In some embodiments, the mutein comprises a E15A mutation. In some embodiments, the mutein comprises a E15G mutation. In some embodiments, the mutein comprises a E15S mutation. In some embodiments, the mutein comprises a H16A mutation. In some embodiments, the mutein comprises a H16D mutation. In some embodiments, the mutein comprises a H16G mutation. In some embodiments, the mutein comprises a H16K mutation. In some embodiments, the mutein comprises a H16 M mutation. In some embodiments, the mutein comprises a H16N mutation. In some embodiments, the mutein comprises a H16R mutation. In some embodiments, the mutein comprises a H16S mutation. In some embodiments, the mutein comprises a H16T mutation. In some embodiments, the mutein comprises a H16V mutation. In some embodiments, the mutein comprises a H16Y mutation. In some embodiments, the mutein comprises a L19A mutation. In some embodiments, the mutein comprises a L19D mutation. In some embodiments, the mutein comprises a L19 E mutation. In some embodiments, the mutein comprises a L19G mutation. In some embodiments, the mutein comprises a L19N mutation. In some embodiments, the mutein comprises a L19R mutation. In some embodiments, the mutein comprises a L19S mutation. In some embodiments, the mutein comprises a L19T mutation. In some embodiments, the mutein comprises a L19V mutation. In some embodiments, the mutein comprises a D20A mutation. In some embodiments, the mutein comprises a D20 E mutation. In some embodiments, the mutein comprises a D20H mutation. In some embodiments, the mutein comprises a D20I mutation. In some embodiments, the mutein comprises a D20Y mutation. In some embodiments, the mutein comprises a D20F mutation. In some embodiments, the mutein comprises a D20G mutation. In some embodiments, the mutein comprises a D20T mutation. In some embodiments, the mutein comprises a D20W mutation. In some embodiments, the mutein comprises a M23R mutation. In some embodiments, the mutein comprises a R81A mutation. In some embodiments, the mutein comprises a R81G mutation. In some embodiments, the mutein comprises a R81S mutation. In some embodiments, the mutein comprises a R81T mutation. In some embodiments, the mutein comprises a D84A mutation. In some embodiments, the mutein comprises a D84 E mutation. In some embodiments, the mutein comprises a D84G mutation. In some embodiments, the mutein comprises a D84I mutation. In some embodiments, the mutein comprises a D84 M mutation. In some embodiments, the mutein comprises a D84Q mutation. In some embodiments, the mutein comprises a D84R mutation. In some embodiments, the mutein comprises a D84S mutation. In some embodiments, the mutein comprises a D84T mutation. In some embodiments, the mutein comprises a S87R mutation. In some embodiments, the mutein comprises a N88A mutation. In some embodiments, the mutein comprises a N88D mutation. In some embodiments, the mutein comprises a N88 E mutation. In some embodiments, the mutein comprises a N88I mutation. In some embodiments, the mutein comprises a N88F mutation. In some embodiments, the mutein comprises a N88G mutation. In some embodiments, the mutein comprises a N88 M mutation. In some embodiments, the mutein comprises a N88R mutation. In some embodiments, the mutein comprises a N88S mutation. In some embodiments, the mutein comprises a N88V mutation. In some embodiments, the mutein comprises a N88W mutation. In some embodiments, the mutein comprises a V91D mutation. In some embodiments, the mutein comprises a V91 E mutation. In some embodiments, the mutein comprises a V91G mutation. In some embodiments, the mutein comprises a V91S mutation. In some embodiments, the mutein comprises a I92K mutation. In some embodiments, the mutein comprises a I92R mutation. In some embodiments, the mutein comprises a E95G mutation. In some embodiments, the mutein comprises a Q126 mutation.

[0181] Although the mutations are illustrated in list form, this is simply for convenience and the muteins may have one or more of the substitutions provided herein.

[0182] In some embodiments, the IL-2 mutein molecule comprises a substitution selected from the group consisting of: N88R, N88I, N88G, D20H, D109C, Q126L, Q126F, D84G, or D84I relative to mature human IL-2 sequence provided above. In some embodiments, the IL-2 mutein molecule comprises a substitution of D109C and one or both of a N88R substitution and a C125S substitution. In some embodiments, the cysteine that is in the IL-2 mutein molecule at position 109 is linked to a polyethylene glycol moiety, wherein the polyethylene glycol moiety has a molecular weight of between 5 and 40 kDa.

[0183] In some embodiments, any of the substitutions described herein are combined with a substitution at position 125. The substitution can be a C125S, C125A, or C125V substitution.

[0184] In addition to the substitutions or mutations described herein, in some embodiments, the IL-2 mutein has a substitution/mutation at one or more of positions 73, 76, 100, or 138 that correspond to SEQ ID NO: 15 or positions at one or more of positions 53, 56, 80, or 118 that correspond to SEQ ID NO: 6. In some embodiments, the IL-2 mutein comprises a mutation at positions 73 and 76; 73 and 100; 73 and 138; 76 and 100; 76 and 138; 100 and 138; 73, 76, and 100; 73, 76, and 138; 73, 100, and 138; 76, 100 and 138; or at each of 73, 76, 100, and 138 that correspond to SEQ ID NO: 15. In some embodiments, the IL-2 mutein comprises a mutation at positions 53 and 56; 53 and 80; 53 and 118; 56 and 80; 56 and 118; 80 and 118; 53, 56, and 80; 53, 56, and 118; 53, 80, and 118; 56, 80 and 118; or at each of 53, 56, 80, and 118 that correspond to SEQ ID NO: 6. As the IL-2 can be fused or tethered to other proteins, as used herein, the term corresponds to as reference to a SEQ ID NOs: 6 or 15 refer to how the sequences would align with default settings for alignment software, such as can be used with the NCBI website. In some embodiments, the mutation is leucine to isoleucine. Thus, the IL-2 mutein can comprise one more isoleucines at positions 73, 76, 100, or 138 that correspond to SEQ ID NO: or positions at one or more of positions 53, 56, 80, or 118 that correspond to SEQ ID NO: 6. In some embodiments, the mutein comprises a mutation at L53 that correspond to SEQ ID NO: 6. In some embodiments, the mutein comprises a mutation at L56 that correspond to SEQ ID NO: 6. In some embodiments, the mutein comprises a mutation at L80 that correspond to SEQ ID NO: 6. In some embodiments, the mutein comprises a mutation at L118 that correspond to SEQ ID NO: 6. In some embodiments, the mutation is leucine to isoleucine. In some embodiments, the mutein also comprises a mutation as position 69, 74, 88, 125, or any combination thereof in these muteins that correspond to SEQ ID NO: 6. In some embodiments, the mutation is a V69A mutation. In some embodiments, the mutation is a Q74P mutation. In some embodiments, the mutation is a N88D or N88R mutation. In some embodiments, the mutation is a C125A or C125S mutation.

[0185] In some embodiments, the IL-2 mutein comprises a mutation at one or more of positions 49, 51, 55, 57, 68, 89, 91, 94, 108, and 145 that correspond to SEQ ID NO: 15 or one or more positions 29, 31, 35, 37, 48, 69, 71, 74, 88, and 125 that correspond to SEQ ID NO: 6. The substitutions can be used alone or in combination with one another. In some embodiments, the IL-2 mutein comprises substitutions at 2, 3, 4, 5, 6, 7, 8, 9, or each of positions 49, 51, 55, 57, 68, 89, 91, 94, 108, and 145. Non-limiting examples such combinations include, but are not limited to, a mutation at positions 49, 51, 55, 57, 68, 89, 91, 94, 108, and 145; 49, 51, 55, 57, 68, 89, 91, 94, and 108; 49, 51, 55, 57, 68, 89, 91, and 94; 49, 51, 55, 57, 68, 89, and 91; 49, 51, 55, 57, 68, and 89; 49, 51, 55, 57, and 68; 49, 51, 55, and 57; 49, 51, and 55; 49 and 51; 51, 55, 57, 68, 89, 91, 94, 108, and 145; 51, 55, 57, 68, 89, 91, 94, and 108; 51, 55, 57, 68, 89, 91, and 94; 51, 55, 57, 68, 89, and 91; 51, 55, 57, 68, and 89; 55, 57, and 68; 55 and 57; 55, 57, 68, 89, 91, 94, 108, and 145; 55, 57, 68, 89, 91, 94, and 108; 55, 57, 68, 89, 91, and 94; 55, 57, 68, 89, 91, and 94; 57, 68, 89, and 91; 55, 57, 68, and 89; 55, 57, and 68; 55 and 57; 57, 68, 89, 91, 94, 108, and 145; 57, 68, 89, 91, 94, and 108; 57, 68, 89, 91, and 94; 57, 68, 89, and 91; 57, 68, and 89; 57 and 68; 68, 89, 91, 94, 108, and 145; 68, 89, 91, 94, and 108; 68, 89, 91, and 94; 68, 89, and 91; 68 and 89; 89, 91, 94, 108, and 145; 89, 91, 94, and 108; 89, 91, and 94; 89 and 91; 91, 94, 108, and 145; 91, 94, and 108; 91, and 94; or 94 and 108. Each mutation can be combined with one another. The same substitutions can be made in SEQ ID NO: 6, but the numbering would adjusted appropriately as is clear from the present disclosure (20 less than the numbering for SEQ ID NO: 15 corresponds to the positions in SEQ ID NO: 6).

[0186] In some embodiments, the IL-2 mutein comprises a mutation at one or more positions of 35, 36, 42, 104, 115, or 146 that correspond to SEQ ID NO: 15 or the equivalent positions at SEQ ID NO: 6 (e.g. positions 15, 16, 22, 84, 95, or 126). These mutations can be combined with the other leucine to isoleucine mutations described herein or the mutation at positions 73, 76, 100, or 138 that correspond to SEQ ID NO: 15 or at one or more of positions 53, 56, 80, or 118 that correspond to SEQ ID NO: 6. In some embodiments, the mutation is a E35Q, H36N, Q42 E, D104N, E115Q, or Q146 E, or any combination thereof. In some embodiments, one or more of these substitutions is wild type. In some embodiments, the mutein comprises a wild-type residue at one or more of positions 35, 36, 42, 104, 115, or 146 that correspond to SEQ ID NO: 15 or the equivalent positions at SEQ ID NO: 6 (e.g. positions 15, 16, 22, 84, 95, and 126).

[0187] The mutations at these positions can be combined with any of the other mutations described herein, including, but not limited to substitutions at positions 73, 76, 100, or 138 that correspond to SEQ ID NO: 15 or positions at one or more of positions 53, 56, 80, or 118 that correspond to SEQ ID NO: 6 described herein and above. In some embodiments, the IL-2 mutein comprises a N49S mutation that corresponds to SEQ ID NO: 15. In some embodiments, the IL-2 mutein comprises a Y51S or a Y51H mutation that corresponds to SEQ ID NO: 15. In some embodiments, the IL-2 mutein comprises a K55R mutation that corresponds to SEQ ID NO: 15. In some embodiments, the IL-2 mutein comprises a T57A mutation that corresponds to SEQ ID NO: 15. In some embodiments, the IL-2 mutein comprises a K68 E mutation that corresponds to SEQ ID NO: 15. In some embodiments, the IL-2 mutein comprises a V89A mutation that corresponds to SEQ ID NO: 15. In some embodiments, the IL-2 mutein comprises a N91R mutation that corresponds to SEQ ID NO: 15. In some embodiments, the IL-2 mutein comprises a Q94P mutation that corresponds to SEQ ID NO: 15. In some embodiments, the IL-2 mutein comprises a N108D or a N108R mutation that corresponds to SEQ ID NO: 15. In some embodiments, the IL-2 mutein comprises a C145A or C145S mutation that corresponds to SEQ ID NO: 15. These substitutions can be used alone or in combination with one another. In some embodiments, the mutein comprises each of these substitutions. In some embodiments, the mutein comprises 1, 2, 3, 4, 5, 6, 7, or 8 of these mutations. In some embodiments, the mutein comprises a wild-type residue at one or more of positions 35, 36, 42, 104, 115, or 146 that correspond to SEQ ID NO: 15 or the equivalent positions at SEQ ID NO: 6 (e.g. positions 15, 16, 22, 84, 95, and 126).

[0188] In some embodiments, the IL-2 mutein comprises a N29S mutation that corresponds to SEQ ID NO: 6. In some embodiments, the IL-2 mutein comprises a Y31S or a Y31H mutation that corresponds to SEQ ID NO: 6. In some embodiments, the IL-2 mutein comprises a K35R mutation that corresponds to SEQ ID NO: 6. In some embodiments, the IL-2 mutein comprises a T37A mutation that corresponds to SEQ ID NO: 6. In some embodiments, the IL-2 mutein comprises a K48 E mutation that corresponds to SEQ ID NO: 6. In some embodiments, the IL-2 mutein comprises a V69A mutation that corresponds to SEQ ID NO: 6. In some embodiments, the IL-2 mutein comprises a N71R mutation that corresponds to SEQ ID NO: 6. In some embodiments, the IL-2 mutein comprises a Q74P mutation that corresponds to SEQ ID NO: 6. In some embodiments, the IL-2 mutein comprises a N88D or a N88R mutation that corresponds to SEQ ID NO: 6. In some embodiments, the IL-2 mutein comprises a C125A or C125S mutation that corresponds to SEQ ID NO: 6. These substitutions can be used alone or in combination with one another. In some embodiments, the mutein comprises 1, 2, 3, 4, 5, 6, 7, or 8 of these mutations. In some embodiments, the mutein comprises each of these substitutions. In some embodiments, the mutein comprises a wild-type residue at one or more of positions 35, 36, 42, 104, 115, or 146 that correspond to SEQ ID NO: 15 or the equivalent positions at SEQ ID NO: 6 (e.g. positions 15, 16, 22, 84, 95, and 126).

[0189] For any of the IL-2 muteins described herein, in some embodiments, one or more of positions 35, 36, 42, 104, 115, or 146 that correspond to SEQ ID NO: 15 or the equivalent positions at SEQ ID NO: 6 (e.g. positions 15, 16, 22, 84, 95, or 126) are wild-type (e.g., are as shown in SEQ ID NOs: 6 or 15). In some embodiments, 2, 3, 4, 5, 6, or each of positions 35, 36, 42, 104, 115, or 146 that correspond to SEQ ID NO: 15 or the equivalent positions at SEQ ID NO: 6 (e.g. positions 15, 16, 22, 84, 95, and 126) are wild-type.

[0190] In some embodiments, the IL-2 mutein comprises a sequence of:

(SEQ ID NO: 16)
MYRMQLLSCIALSLALVTNSAPTSSSTKKTQLQLEHLLLDL
QMILNGISNHKNPRLARMLTFKFYMPEKATEIKHLQCLEEE
LKPLEEALRLAPSKNFHLRPRDLISDINVIVLELKGSETTFMC
EYADETATIVEFLNRWITFSQSIISTLT

[0191] In some embodiments, the IL-2 mutein comprises a sequence of:

(SEQ ID NO: 17)
MYRMQLLSCIALSLALVTNSAPTSSSTKKTQLQLEHLLLDL
QMILNGISNHKNPRLARMLTFKFYMPEKATELKHIQCLEEE
LKPLEEALRLAPSKNFHLRPRDLISDINVIVLELKGSETTFMC
EYADETATIVEFLNRWITFSQSIISTLT

[0192] In some embodiments, the IL-2 mutein comprises a sequence of:

(SEQ ID NO: 18)
MYRMQLLSCIALSLALVTNSAPTSSSTKKTQLQLEHLLLDL
QMILNGISNHKNPRLARMLTFKFYMPEKATELKHLQCLEEE
LKPLEEALRLAPSKNFHIRPRDLISDINVIVLELKGSETTFMC
EYADETATIVEFLNRWITFSQSIISTLT

[0193] In some embodiments, the IL-2 mutein comprises a sequence of:

(SEQ ID NO: 19)
MYRMQLLSCIALSLALVTNSAPTSSSTKKTQLQLEHLLLDL
QMILNGISNHKNPRLARMLTFKFYMPEKATELKHLQCLEEE
LKPLEEALRLAPSKNFHLRPRDLISDINVIVLELKGSETTFMC
EYADETATIVEFINRWITFSQSIISTLT

[0194] In some embodiments, the IL-2 mutein sequences described herein do not comprise the IL-2 leader sequence. The IL-2 leader sequence can be represented by the sequence of MYRMQLLSCIALSLALVTNS (SEQ ID NO: 20). Therefore, in some embodiments, the sequences illustrated above can also encompass peptides without the leader sequence. Although SEQ ID NOs; 16-20 are illustrated with only mutation at one of positions 73, 76, 100, or 138 that correspond to SEQ ID NO: 15 or positions at one or more of positions 53, 56, 80, or 118 that correspond to SEQ ID NO: 6, the peptides can comprises one, two, three or 4 of the mutations at these positions. In some embodiments, the substitution at each position is isoleucine or other type of conservative amino acid substitution. In some embodiments, the leucine at the recited positions are substituted with, independently, isoleucine, valine, methionine, or phenylalanine.

[0195] In some embodiments, the IL-2 mutein molecule is fused to a Fc Region or other linker region as described herein. Examples of such fusion proteins can be found in U.S. Pat. Nos. 9,580,486, 7,105,653, 9,616,105, 9,428,567, US2017/0051029, WO2016/164937, US2014/0286898A1, WO2014153111A2, WO2010/085495, WO2016014428A2, WO2016025385A1, US2017/0037102, and US2006/0269515, each of which are incorporated by reference in its entirety.

[0196] In some embodiments, the Fc Region comprises what is known as the LALA mutation. Using the Kabat numbering of the Fc region, this would correspond to L247A, L248A, and G250A. In some embodiments, using the EU numbering of the Fc region, the Fc region comprises a L234A mutation, a L235A mutation, and/or a G237A mutation. Regardless of the numbering system used, in some embodiments, the Fc portion can comprise mutations that correspond to these residues. In some embodiments, the Fc Region comprises N297G or N297A (kabat numbering) mutations. The Kabat numbering is based upon a full-length sequence, but would be used in a fragment based upon a traditional alignment used by one of skill in the art for the Fc region.

[0197] In some embodiments, the Fc Region comprises a sequence of:

(SEQ ID NO: 21)
DKTHTCPPCPAPEAAGAPSVFLFPPKPKDTLMISRTPEVTCV
VVDVSHEDPEVKFNWYVDGVEVHNAKTKPREEQYNSTYR
VVSVLTVLHQDWLNGKEYKCKVSNKALPAPIEKTISKAKG
QPREPQVYTLPPSREEMTKNQVSLTCLVKGFYPSDIAVEWE
SNGQPENNYKTTPPVLDSDGSFFLYSKLTVDKSRWQQGNV
FSCSVMHEALHNHYTQKSLSLSPG.
or
(SEQ ID NO: 28)
DKTHTCPPCPAPELLGGPSVFLFPPKPKDTLMISRTPEVTCV
VVDVSHEDPEVKFNWYVDGVEVHNAKTKPREEQYNSTYR
VVSVLTVLHQDWLNGKEYKCKVSNKALPAPIEKTISKAKG
QPREPQVYTLPPSREEMTKNQVSLTCLVKGFYPSDIAVEWE
SNGQPENNYKTTPPVLDSDGSFFLYSKLTVDKSRWQQGNV
FSCSVMHEALHNHYTQKSLSLSPG.

[0198] In some embodiments, the IL-2 mutein is linked to the Fc Region. Non-limiting examples of linkers are glycine/serine linkers. For example, a glycine/serine linkers can be a sequence of GGGGSGGGGSGGGGSGGGGS (SEQ ID NO: 22) or GGGGSGGGGSGGGGS (SEQ ID NO: 30). This is simply a non-limiting example and the linker can have varying number of GGGGS (SEQ ID NO: 23) or GGGGA repeats (SEQ ID NO: 29). In some embodiments, the linker comprises 1, 2, 3, 4, 5, 6, 7, 8, 9, or 10 of the GGGGS (SEQ ID NO: 23) or GGGGA repeats (SEQ ID NO: 29) (repeats disclosed as SEQ ID NOS 1550-1551, respectively). In some embodiments, the linker is 10 amino acids in length. In some embodiments, the linker is 5 amino acids in length. In some embodiments, the linker is 15 amino acids in length. In some embodiments, the linker is 20 amino acids in length. In some embodiments, the linker is 25 amino acids in length. In some embodiments, the linker is 30 amino acids in length. In some embodiments, the linker is 35 amino acids in length. In some embodiments, the linker is from 5-50 amino acids in length.

[0199] Thus, the IL-2/Fc Fusion can be represented by the formula of Z_{IL-2M}-L_{gs}-Z_{Fc}, wherein Z_{IL-2M} is a IL-2 mutein as described herein, L_{gs} is a linker sequence as described herein (e.g. glycine/serine linker) and Z_{Fc} is a Fc region described herein or known to one of skill in the art. In some embodiments, the formula can be in the reverse orientation Z_{Fc}-L_{gs}-Z_{IL-2M}.

[0200] In some embodiments, the IL-2/Fc fusion comprises a sequence of:

(SEQ ID NO: 24)
MYRMQLLSCIALSLALVTNSAPTSSSTKKTQLQLEHLLLDL
QMILNGISNHKNPRLARMLTFKFYMPEKATEIKHLQCLEEE
LKPLEEALRLAPSKNFHLRPRDLISDINVIVLELKGSETTFMC
EYADETATIVEFLNRWITFSQSIISTLTGGGGSGGGGSGGGG
SGGGGSDKTHTCPPCPAPEAAGAPSVFLFPPKPKDTLMISRT
PEVTCVVVDVSHEDPEVKFNWYVDGVEVHNAKTKPREEQ
YNSTYRVVSVLTVLHQDWLNGKEYKCKVSNKALPAPIEKT
ISKAKGQPREPQVYTLPPSREEMTKNQVSLTCLVKGFYPSDI
AVEWESNGQPENNYKTTPPVLDSDGSFFLYSKLTVDKSRW
QQGNVFSCSVMHEALHNHYTQKSLSLSPG;
(SEQ ID NO: 25)
MYRMQLLSCIALSLALVTNSAPTSSSTKKTQLQLEHLLLDL
QMILNGISNHKNPRLARMLTFKFYMPEKATELKHIQCLEEE
LKPLEEALRLAPSKNFHLRPRDLISDINVIVLELKGSETTFMC
EYADETATIVEFLNRWITFSQSIISTLTGGGGSGGGGSGGGG
SGGGGSDKTHTCPPCPAPEAAGAPSVFLFPPKPKDTLMISRT
PEVTCVVVDVSHEDPEVKFNWYVDGVEVHNAKTKPREEQ
YNSTYRVVSVLTVLHQDWLNGKEYKCKVSNKALPAPIEKT
ISKAKGQPREPQVYTLPPSREEMTKNQVSLTCLVKGFYPSDI
AVEWESNGQPENNYKTTPPVLDSDGSFFLYSKLTVDKSRW
QQGNVFSCSVMHEALHNHYTQKSLSLSPG;
(SEQ ID NO: 26)
MYRMQLLSCIALSLALVTNSAPTSSSTKKTQLQLEHLLLDL
QMILNGISNHKNPRLARMLTFKFYMPEKATELKHLQCLEEE
LKPLEEALRLAPSKNFHIRPRDLISDINVIVLELKGSETTFMC
EYADETATIVEFLNRWITFSQSIISTLTGGGGSGGGGSGGGG
SGGGGSDKTHTCPPCPAPEAAGAPSVFLFPPKPKDTLMISRT
PEVTCVVVDVSHEDPEVKFNWYVDGVEVHNAKTKPREEQ
YNSTYRVVSVLTVLHQDWLNGKEYKCKVSNKALPAPIEKT
ISKAKGQPREPQVYTLPPSREEMTKNQVSLTCLVKGFYPSDI
AVEWESNGQPENNYKTTPPVLDSDGSFFLYSKLTVDKSRW
QQGNVFSCSVMHEALHNHYTQKSLSLSPG;
or
(SEQ ID NO: 27)
MYRMQLLSCIALSLALVTNSAPTSSSTKKTQLQLEHLLLDL
QMILNGISNHKNPRLARMLTFKFYMPEKATELKHLQCLEEE
LKPLEEALRLAPSKNFHLRPRDLISDINVIVLELKGSETTFMC
EYADETATIVEFINRWITFSQSIISTLTGGGGSGGGGSGGGGS
GGGGSDKTHTCPPCPAPEAAGAPSVFLFPPKPKDTLMISRTP
EVTCVVVDVSHEDPEVKFNWYVDGVEVHNAKTKPREEQY
NSTYRVVSVLTVLHQDWLNGKEYKCKVSNKALPAPIEKTIS
KAKGQPREPQVYTLPPSREEMTKNQVSLTCLVKGFYPSDIA
VEWESNGQPENNYKTTPPVLDSDGSFFLYSKLTVDKSRWQ
QGNVFSCSVMHEALHNHYTQKSLSLSPG.

[0201] In some embodiments, the IL-2/Fc Fusion comprises a sequence selected from the following table, Table 3:

TABLE 3
IL-2/Fc Fusion Protein Amino Acid Sequences

| Sequence | |
|---|---|
| Identification | Sequence |
| SEQ ID NO: 7 | APTSSSTKKTQLQLEHLLLDLQMILNGINNYKNPKLTRMLTFKFYMPKKATELKHLQCLEE |
| | ELKPLEEVLNLAQSKNFHLRPRDLISRINVIVLELKGSETTFMCEYADETATIVEFLNRWI |
| | TFSQSIISTLTGGGGAGGGGDKTHTCPPCPAPELLGGPSVFLFPPKPKDTLMISRTPEVTC |
| | VVVDVSHEDPEVKFNWYVDGVEVHNAKTKPREEQYASTYRVVSVLTVLHQDWLNGKEYKCK |
| | VSNKALPAPIEKTISKAKGQPREPQVYTLPPSRDELTKNQVSLTCLVKGFYPSDIAVEWES |
| | NGQPENNYKTTPPVLDSDGSFFLYSKLTVDKSRWQQGNVFSCSVMHEALHNHYTQKSLSLS |
| | PGK |
| SEQ ID NO: 8 | APTSSSTKKTQLQLEHLLLHLQMILNGINNYKNPKLTRMLTFKFYMPKKATELKHLQCLEE |
| | ELKPLEEVLNLAQSKNFHLRPRDLISNINVIVLELKGSETTFMCEYADETATIVEFLNRWI |
| | TFSQSIISTLTVECPPCPAPPVAGPSVFLFPPKPKDTLMISRTPEVTCVVVDVSHEDPEVQ |
| | FNWYVDGVEVHNAKTKPREEQFNSTFRVVSVLTVVHQDWLNGKEYKCKVSNKGLPAPIEKT |
| | ISKTKGQPREPQVYTLPPSREEMTKNQVSLTCLVKGFYPSDIAVEWESNGQPENNYKTTPP |
| | MLDSDGSFFLYSKLTVDKSRWQQGNVFSCSVMHEALHNHYTQKSLSLSPGK |
| SEQ ID NO: 9 | APTSSSTKKTQLQLEHLLLDLQMILNGINNYKNPKLTRMLTFKFYMPKKATELKHLQCLEE |
| | ELKPLEEVLNLAQSKNFHLRPRDLISRINVIVLELKGSETTFMCEYADETATIVEFLNRWI |
| | TFSQSIISTLTDKTHTCPPCPAPELLGGPSVFLFPPKPKDTLMISRTPEVTCVVVDVSHED |
| | PEVKFNWYVDGVEVHNAKTKPREEQYASTYRVVSVLTVLHQDWLNGKEYKCKVSNKALPAP |
| | IEKTISKAKGQPREPQVYTLPPSRDELTKNQVSLTCLVKGFYPSDIAVEWESNGQPENNYK |
| | TTPPVLDSDGSFFLYSKLTVDKSRWQQGNVFSCSVMHEALHNHYTQKSLSLSPG |
| SEQ ID NO: 10 | APTSSSTKKTQLQLEHLLLDLQMILNGINNYKNPKLTRMLTFKFYMPKKATELKHLQCLEE |
| | ELKPLEEVLNLAQSKNFHLRPRDLISRINVIVLELKGSETTFMCEYADETATIVEFLNRWI |
| | TFSQSIISTLTGGGGSDKTHTCPPCPAPELLGGPSVFLFPPKPKDTLMISRTPEVTCVVVD |
| | VSHEDPEVKFNWYVDGVEVHNAKTKPREEQYASTYRVVSVLTVLHQDWLNGKEYKCKVSNK |
| | ALPAPIEKTISKAKGQPREPQVYTLPPSRDELTKNQVSLTCLVKGFYPSDIAVEWESNGQP |
| | ENNYKTTPPVLDSDGSFFLYSKLTVDKSRWQQGNVFSCSVMHEALHNHYTQKSLSLSPG |
| SEQ ID NO: 11 | APTSSSTKKTQLQLEHLLLDLQMILNGINNYKNPKLTRMLTFKFYMPKKATELKHLQCLEE |
| | ELKPLEEVLNLAQSKNFHLRPRDLISRINVIVLELKGSETTFMCEYADETATIVEFLNRWI |
| | TFSQSIISTLTGGGGSGGGGSDKTHTCPPCPAPELLGGPSVFLFPPKPKDTLMISRTPEVT |
| | CVVVDVSHEDPEVKFNWYVDGVEVHNAKTKPREEQYASTYRVVSVLTVLHQDWLNGKEYKC |
| | KVSNKALPAPIEKTISKAKGQPREPQVYTLPPSRDELTKNQVSLTCLVKGFYPSDIAVEWE |
| | SNGQPENNYKTTPPVLDSDGSFFLYSKLTVDKSRWQQGNVFSCSVMHEALHNHYTQKSLSL |
| | SPG |
| SEQ ID NO: 12 | APTSSSTKKTQLQLEHLLLDLQMILNGINNYKNPKLTRMLTFKFYMPKKATELKHLQCLEE |
| | ELKPLEEVLNLAQSKNFHLRPRDLISRINVIVLELKGSETTFMCEYADETATIVEFLNRWI |
| | TFSQSIISTLTGGGGSGGGGSGGGGSDKTHTCPPCPAPELLGGPSVFLFPPKPKDTLMISR |
| | TPEVTCVVVDVSHEDPEVKFNWYVDGVEVHNAKTKPREEQYASTYRVVSVLTVLHQDWING |
| | KEYKCKVSNKALPAPIEKTISKAKGQPREPQVYTLPPSRDELTKNQVSLTCLVKGFYPSDI |
| | AVEWESNGQPENNYKTTPPVLDSDGSFFLYSKLTVDKSRWQQGNVFSCSVMHEALHNYHTQ |
| | KSLSLSPG |
| SEQ ID NO: 13 | APTSSSTKKTQLQLEHLLLDLQMILNGINNYKNPKLTRMLTFKFYMPKKATELKHLQCLEE |
| | ELKPLEEVLNLAQSKNFHLRPRDLISRINVIVLELKGSETTFMCEYADETATIVEFLNRWI |
| | TFSQSIISTLTGGGGSGGGGSGGGGSGGGGSDKTHTCPPCPAPELLGGPSVFLFPPKPKDT |
| | LMISRTPEVTCVVVDVSHEDPEVKFNWYVDGVEVHNAKTKPREEQYASTYRVVSVLTVLHQ |
| | DWLNGKEYKCKVSNKALPAPIEKTISKAKGQPREPQVYTLPPSRDELTKNQVSLTCLVKGF |
| | YPSDIAVEWESNGQPENNYKTTPPVLDSDGSFFLYSKLTVDKSRWQQGNVFSCSVMHEALH |
| | NHYTQKSLSLSPG |
| SEQ ID NO: 14 | APTSSSTKKTQLQLEHLLLHLQMILNGINNYKNPKLTRMLTFKFYMPKKATELKHLQCLEE |
| | ELKPLEEVLNLAQSKNFHLRPRDLISNINVIVLELKGSETTFMCEYADETATIVEFLNRWI |
| | TFSQSIISTLTGGGGSGGGGSGGGGSDKTHTCPPCPAPELLGGPSVFLFPPKPKDTLMISR |
| | TPEVTCVVVDVSHEDPEVKFNWYVDGVEVHNAKTKPREEQYASTYPVVSVLTVLHQDWING |
| | KEYKCKVSNKALPAPIEKTISKAKGQPREPQVYTLPPSRDELTKNQVSLTCLVKGFYPSDI |
| | AVEWESNGQPENNYKTTPPVLDSDGSFFLYSKLTVDKSRWQQGNVFSCSVMHEALHNHYTQ |
| | KSLSLSPG |

[0202] In some embodiments, the IL-2 muteins comprises one or more of the sequences provided in the following table, which, in some embodiments, shows the IL-2 mutein fused with other proteins or linkers. The table also provides sequences for a variety of Fc domains or variants that the IL-2 can be fused with:

| SEQ ID | Brief | |
|---|---|---|
| NO: | Description | Amino Acid Sequence |
| 31 | Human IL-2 | APTSSSTKKTQLQLEHLLLDLQMILNGINNYKNPKLTRMLTFKFYMPKKA |
| | with C125S | TELKHLQCLEEELKPLEEVLNLAQSKNFHLRPRDLISNINVIVLELKGSE |
| | mutation | TTFMCEYADETATIVEFLNRWITFSQSIISTLT |
| 32 | Human IL-2 | APASSSTKKTQLQLEHLLLDLQMILNGINNYKNPKLTRMLTFKFYMPKKA |
| | with C125S | TELKHLQCLEEELKPLEEVLNLAQSKNFHLRPRDLISNINVIVLELKGSE |
| | and T3A | TTFMCEYADETATIVEFLNRWITFSQSIISTLT |
| | mutations | |
| 33 | Human IL-2 | APTSSSTKKTQLQLEHLLLDLQMILNGINNYKNPKLTRMLTFKFYMPKKA |
| | with N88R and | TELKHLQCLEEELKPLEEVLNLAQSKNFHLRPRDLISRINVIVLELKGSE |
| | C125S | TTFMCEYADETATIVEFLNRWITFSQSIISTLT |
| 34 | Human IL-2 | APTSSSTKKTQLQLEHLLLDLQMILNGINNYKNPKLTRMLTFKFYMPKKA |
| | with V69A, | TELKHLQCLEEELKPLEEALNLAPSKNFHLRPRDLISNINVIVLELKGSE |
| | Q74P and | TTFMCEYADETATIVEFLNRWITFSQSIISTLT |
| | C125S | |
| | mutations | |
| 35 | Human IL-2 | APTSSSTKKTQLQLEHLLLDLQMILNGINNYKNPKLTRMLTFKFYMPKKA |
| | with V69A, | TELKHLQCLEEELKPLEEALNLAPSKNFHLRPRDLISDINVIVLELKGSE |
| | Q74P, N88D | TTFMCEYADETATIVEFLNRWITFSQSIISTLT |
| | and C125S | |
| | mutations | |
| 36 | Human IL-2 | APTSSSTKKTQLQLEHLLLDLQMILNGINNYKNPKLTRMLTFKFYMPKKA |
| | with V69A, | TELKHLQCLEEELKPLEEALNLAPSKNFHLRPRDLISRINVIVLELKGSE |
| | Q74P, N88R | TTFMCEYADETATIVEFLNRWITFSQSIISTLT |
| | and C125S | |
| | mutations | |
| 37 | Human IL-2 | APTSSSTKKTQLQLEHLLLDLQMILNGINNYKNPKLTRMLTFKFYMPKKA |
| | with N88D and | TELKHLQCLEEELKPLEEVLNLAQSKNFHLRPRDLISDINVIVLELKGSE |
| | C125S | TTFMCEYADETATIVEFLNRWITFSQSIISTLT |
| 38 | Human IL-2 | APTSSSTKKTQLQLEHLLLDLQMILNGINNYKNPKLTRMLTFKFYMPKKA |
| | with L53I, | TEIKHLQCLEEELKPLEEALNLAPSKNFHLRPRDLISDINVIVLELKGSE |
| | V69A, Q74P, | TTFMCEYADETATIVEFLNRWITFSQSIISTLT |
| | N88D and | |
| | C125S | |
| | mutations | |
| 39 | Human IL-2 | APTSSSTKKTQLQLEHLLLDLQMILNGINNYKNPKLTRMLTFKFYMPKKA |
| | with L56I, | TELKHIQCLEEELKPLEEALNLAPSKNFHLRPRDLISDINVIVLELKGSE |
| | V69A, Q74P, | TTFMCEYADETATIVEFLNRWITFSQSIISTLT |
| | N88D and | |
| | C125S | |
| | mutations | |
| 40 | Human IL-2 | APTSSSTKKTQLQLEHLLLDLQMILNGINNYKNPKLTRMLTFKFYMPKKA |
| | with V69A, | TELKHLQCLEEELKPLEEALNLAPSKNFHIRPRDLISDINVIVLELKGSE |
| | Q74P, L80I, | TTFMCEYADETATIVEFLNRWITFSQSIISTLT |
| | N88D and | |
| | C125S | |
| | mutations | |
| 41 | Human IL-2 | APTSSSTKKTQLQLEHLLLDLQMILNGINNYKNPKLTRMLTFKFYMPKKA |
| | with V69A, | TELKHLQCLEEELKPLEEALNLAPSKNFHLRPRDLISDINVIVLELKGSE |
| | Q74P, N88D, | TTFMCEYADETATIVEFINRWITFSQSIISTLT |
| | L118I, and | |
| | C125S | |
| | mutations | |
| 21 | Human IgG1 Fc | DKTHTCPPCPAPEAAGAPSVELFPPKPKDTLMISRTPEVTCVVVDVSHED |
| | (N-terminal | PEVKFNWYVDGVEVHNAKTKPREEQYNSTYRVVSVLTVLHQDWLNGKEYK |
| | fusions) with | CKVSNKALPAPIEKTISKAKGQPREPQVYTLPPSREEMTKNQVSLTCLVK |
| | L234A, L235A, | GFYPSDIAVEWESNGQPENNYKTTPPVLDSDGSFFLYSKLTVDKSRWQQG |
| | and G237A | NVFSCSVMHEALHNHYTQKSLSLSPG |
| | mutations | |
| 30 | GGGGSGGGGSGGG | GGGGSGGGGSGGGGS |
| | GS linker (15 | |
| | amino acids) | |
| 22 | GGGGSGGGGSGGG | GGGGSGGGGSGGGGSGGGGS |
| | GSGGGGS | |
| | linker (20 | |
| | amino acids) | |
| 23 | GGGGS linker | GGGGS |
| | (5 amino | |
| | acids ) | |
| 43 | Human IgG1 Fc | DKTHTCPPCPAPELLGGPSVFLFPPKPKDTLMISRTPEVTCVVVDVSHED |
| | (truncated) | PEVKFNWYVDGVEVHNAKTKPREEQYGSTYRVVSVLTVLHQDWLNGKEYK |
| | with N297G | CKVSNKALPAPIEKTISKAKGQPREPQVYTLPPSREEMTKNQVSLTCLVK |
| | mutation | GFYPSDIAVEWESNGQPENNYKTTPPVLDSDGSFFLYSKLTVDKSRWQQG |
| | | NVFSCSVMHEALHNHYTQKSLSLSPG |
| 44 | Antibody | ASTKGPSVFPLAPSSKSTSGGTAALGCLVKDYFPEPVTVSWNSGALTSGV |
| | Heavy Chain | HTFPAVLQSSGLYSLSSVVTVPSSSLGTQTYICNVNHKPSNTKVDKKVEP |
| | CH1-CH2-CH3 | KSCDKTHTCPPCPAPEAAGAPSVFLFPPKPKDTLMISRTPEVTCVVVDVS |
| | domains | HEDPEVKFNWYVDGVEVHNAKTKPREEQYNSTYRVVSVLTVLHQDWLNGK |
| | (human IgG1 | EYKCKVSNKALPAPIEKTISKAKGQPREPQVYTLPPSREEMTKNQVSLTC |
| | with L234A, | LVKGFYPSDIAVEWESNGQPENNYKTTPPVLDSDGSFFLYSKLTVDKSRW |
| | L235A, and | QQGNVFSCSVMHEALHNHYTQKSLSLSPG |
| | G237A) | |
| 45 | Antibody | RTVAAPSVFIFPPSDEQLKSGTASVVCLLNNFYPREAKVQWKVDNALQSG |
| | Kappa | NSQESVTEQDSKDSTYSLSSTLTLSKADYEKHKVYACEVTHQGLSSPVTK |
| | Constant | SFNRGEC |
| | Domain | |
| | (human) | |
| 46 | IL-2-G4Sx3-Fc | APTSSSTKKTQLQLEHLLLDLQMILNGINNYKNPKLTRMLTFKFYMPKKA |
| | | TELKHLQCLEEELKPLEEVLNLAQSKNFHLRPRDLISNINVIVLELKGSE |
| | | TTFMCEYADETATIVEFLNRWITFSQSIISTLTGGGGSGGGGSGGGGSDK |
| | | THTCPPCPAPEAAGAPSVFLFPPKPKDTLMISRTPEVTCVVVDVSHEDPE |
| | | VKFNWYVDGVEVHNAKTKPREEQYNSTYRVVSVLTVLHQDWLNGKEYKCK |
| | | VSNKALPAPIEKTISKAKGQPREPQVYTLPPSREEMTKNQVSLTCLVKGF |
| | | YPSDIAVEWESNGQPENNYKTTPPVLDSDGSFFLYSKLTVDKSRWQQGNV |
| | | FSCSVMHEALHNHYTQKSLSLSPG |
| 47 | IL-2 T3A- | APASSSTKKTQLQLEHLLLDLQMILNGINNYKNPKLTRMLTFKFYMPKKA |
| | G4Sx3-Fc | TELKHLQCLEEELKPLEEVLNLAQSKNFHLRPRDLISNINVIVLELKGSE |
| | | TTFMCEYADETATIVEFLNRWITFSQSIISTLTGGGGSGGGGSGGGGSDK |
| | | THTCPPCPAPEAAGAPSVFLFPPKPKDTLMISRTPEVTCVVVDVSHEDPE |
| | | VKFNWYVDGVEVHNAKTKPREEQYNSTYRVVSVLTVLHQDWLNGKEYKCK |
| | | VSNKALPAPIEKTISKAKGQPREPQVYTLPPSREEMTKNQVSLTCLVKGF |
| | | YPSDIAVEWESNGQPENNYKTTPPVLDSDGSFFLYSKLTVDKSRWQQGNV |
| | | FSCSVMHEALHNHYTQKSLSLSPG |
| 48 | IL-2 N88R- | APTSSSTKKTQLQLEHLLLDLQMILNGINNYKNPKLTRMLTFKFYMPKKA |
| | G4Sx3-Fc | TELKHLQCLEEELKPLEEVLNLAQSKNFHLRPRDLISRINVIVLELKGSE |
| | | TTFMCEYADETATIVEFLNRWITFSQSIISTLTGGGGSGGGGSGGGGSDK |
| | | THTCPPCPAPEAAGAPSVFLFPPKPKDTLMISRTPEVTCVVVDVSHEDPE |
| | | VKFNWYVDGVEVHNAKTKPREEQYNSTYRVVSVLTVLHQDWLNGKEYKCK |
| | | VSNKALPAPIEKTISKAKGQPREPQVYTLPPSREEMTKNQVSLTCLVKGF |
| | | YPSDIAVEWESNGQPENNYKTTPPVLDSDGSFFLYSKLTVDKSRWQQGNV |
| | | FSCSVMHEALHNHYTQKSLSLSPG |
| 49 | IL-2 V69A, | APTSSSTKKTQLQLEHLLLDLQMILNGINNYKNPKLTRMLTFKFYMPKKA |
| | Q74P, -G4Sx3- | TELKHLQCLEEELKPLEEALNLAPSKNFHLRPRDLISNINVIVLELKGSE |
| | Fc | TTFMCEYADETATIVEFLNRWITFSQSIISTLTGGGGSGGGGSGGGGSDK |
| | | THTCPPCPAPEAAGAPSVELFPPKPKDTLMISRTPEVTCVVVDVSHEDPE |
| | | VKFNWYVDGVEVHNAKTKPREEQYNSTYRVVSVLTVLHQDWLNGKEYKCK |
| | | VSNKALPAPIEKTISKAKGQPREPQVYTLPPSREEMTKNQVSLTCLVKGF |
| | | YPSDIAVEWESNGQPENNYKTTPPVLDSDGSFFLYSKLTVDKSRWQQGNV |
| | | FSCSVMHEALHNHYTQKSLSLSPG |
| 50 | IL-2 N88D | APTSSSTKKTQLQLEHLLLDLQMILNGINNYKNPKLTRMLTFKFYMPKKA |
| | V69A, Q74P- | TELKHLQCLEEELKPLEEALNLAPSKNFHLRPRDLISDINVIVLELKGSE |
| | G4Sx3-Fc | TTFMCEYADETATIVEFLNRWITFSQSIISTLTGGGGSGGGGSGGGGSDK |
| | | THTCPPCPAPEAAGAPSVFLFPPKPKDTLMISRTPEVTCVVVDVSHEDPE |
| | | VKFNWYVDGVEVHNAKTKPREEQYNSTYRVVSVLTVLHQDWLNGKEYKCK |
| | | VSNKALPAPIEKTISKAKGQPREPQVYTLPPSREEMTKNQVSLTCLVKGF |
| | | YPSDIAVEWESNGQPENNYKTTPPVLDSDGSFFLYSKLTVDKSRWQQGNV |
| | | FSCSVMHEALHNHYTQKSLSLSPG |
| 51 | IL-2 N88R | APTSSSTKKTQLQLEHLLLDLQMILNGINNYKNPKLTRMLTFKFYMPKKA |
| | V69A, Q74P- | TELKHLQCLEEELKPLEEALNLAPSKNFHLRPRDLISRINVIVLELKGSE |
| | G4Sx3-Fc | TTFMCEYADETATIVEFLNRWITFSQSIISTLTGGGGSGGGGSGGGGSDK |
| | | THTCPPCPAPEAAGAPSVFLFPPKPKDTLMISRTPEVTCVVVDVSHEDPE |
| | | VKFNWYVDGVEVHNAKTKPREEQYNSTYRVVSVLTVLHQDWLNGKEYKCK |
| | | VSNKALPAPIEKTISKAKGQPREPQVYTLPPSREEMTKNQVSLTCLVKGF |
| | | YPSDIAVEWESNGQPENNYKTTPPVLDSDGSFFLYSKLTVDKSRWQQGNV |
| | | FSCSVMHEALHNHYTQKSLSLSPG |
| 52 | IL-2 N88D- | APTSSSTKKTQLQLEHLLLDLQMILNGINNYKNPKLTRMLTFKFYMPKKA |
| | G4Sx3-Fc | TELKHLQCLEEELKPLEEVLNLAQSKNFHLRPRDLISDINVIVLELKGSE |
| | | TTFMCEYADETATIVEFLNRWITFSQSIISTLTGGGGSGGGGSGGGGSDK |
| | | THTCPPCPAPEAAGAPSVFLFPPKPKDTLMISRTPEVTCVVVDVSHEDPE |
| | | VKFNWYVDGVEVHNAKTKPREEQYNSTYRVVSVLTVLHQDWLNGKEYKCK |
| | | VSNKALPAPIEKTISKAKGQPREPQVYTLPPSREEMTKNQVSLTCLVKGF |
| | | YPSDIAVEWESNGQPENNYKTTPPVLDSDGSFFLYSKLTVDKSRWQQGNV |
| | | FSCSVMHEALHNHYTQKSLSLSPG |
| 53 | IL-2 L53I | APTSSSTKKTQLQLEHLLLDLQMILNGINNYKNPKLTRMLTFKFYMPKKA |
| | N88D V69A, | TEIKHLQCLEEELKPLEEALNLAPSKNFHLRPRDLISDINVIVLELKGSE |
| | Q74P, C125S- | TTFMCEYADETATIVEFLNRWITFSQSIISTLTGGGGSGGGGSGGGGSGG |
| | G4Sx4-Fc | GGSDKTHTCPPCPAPEAAGAPSVELFPPKPKDTLMISRTPEVTCVVVDVS |
| | | HEDPEVKFNWYVDGVEVHNAKTKPREEQYNSTYRVVSVLTVLHQDWLNGK |
| | | EYKCKVSNKALPAPIEKTISKAKGQPREPQVYTLPPSREEMTKNQVSLTC |
| | | LVKGFYPSDIAVEWESNGQPENNYKTTPPVLDSDGSFFLYSKLTVDKSRW |
| | | QQGNVFSCSVMHEALHNHYTQKSLSLSPG |
| 54 | IL-2 L56I | APTSSSTKKTQLQLEHLLLDLQMILNGINNYKNPKLTRMLTFKFYMPKKA |
| | N88D V69A, | TELKHIQCLEEELKPLEEALNLAPSKNFHLRPRDLISDINVIVLELKGSE |
| | Q74P, C125S- | TTFMCEYADETATIVEFLNRWITFSQSIISTLTGGGGSGGGGSGGGGSGG |
| | G4Sx4-Fc | GGSDKTHTCPPCPAPEAAGAPSVELFPPKPKDTLMISRTPEVTCVVVDVS |
| | | HEDPEVKFNWYVDGVEVHNAKTKPREEQYNSTYRVVSVLTVLHQDWLNGK |
| | | EYKCKVSNKALPAPIEKTISKAKGQPREPQVYTLPPSREEMTKNQVSLTC |
| | | LVKGFYPSDIAVEWESNGQPENNYKTTPPVLDSDGSFFLYSKLTVDKSRW |
| | | QQGNVFSCSVMHEALHNHYTQKSLSLSPG |
| 55 | IL-2 L80I | APTSSSTKKTQLQLEHLLLDLQMILNGINNYKNPKLTRMLTFKFYMPKKA |
| | N88D V69A, | TELKHLQCLEEELKPLEEALNLAPSKNFHIRPRDLISDINVIVLELKGSE |
| | C125S Q74P- | TTFMCEYADETATIVEFLNRWITFSQSIISTLTGGGGSGGGGSGGGGSGG |
| | G4Sx4-Fc | GGSDKTHTCPPCPAPEAAGAPSVFLFPPKPKDTLMISRTPEVTCVVVDVS |
| | | HEDPEVKFNWYVDGVEVHNAKTKPREEQYNSTYRVVSVLTVLHQDWLNGK |
| | | EYKCKVSNKALPAPIEKTISKAKGQPREPQVYTLPPSREEMTKNQVSLTC |
| | | LVKGFYPSDIAVEWESNGQPENNYKTTPPVLDSDGSFFLYSKLTVDKSRW |
| | | QQGNVFSCSVMHEALHNHYTQKSLSLSPG |
| 56 | IL-2 L118I | APTSSSTKKTQLQLEHLLLDLQMILNGINNYKNPKLTRMLTFKFYMPKKA |
| | N88D V69A, | TELKHLQCLEEELKPLEEALNLAPSKNFHLRPRDLISDINVIVLELKGSE |
| | Q74P, C125S- | TTFMCEYADETATIVEFINRWITFSQSIISTLTGGGGSGGGGSGGGGSGG |
| | G4Sx4-Fc | GGSDKTHTCPPCPAPEAAGAPSVFLFPPKPKDTLMISRTPEVTCVVVDVS |
| | | HEDPEVKFNWYVDGVEVHNAKTKPREEQYNSTYRVVSVLTVLHQDWLNGK |
| | | EYKCKVSNKALPAPIEKTISKAKGQPREPQVYTLPPSREEMTKNQVSLTC |
| | | LVKGFYPSDIAVEWESNGQPENNYKTTPPVLDSDGSFFLYSKLTVDKSRW |
| | | QQGNVFSCSVMHEALHNHYTQKSLSLSPG |
| 57 | IL-2 N88D | APTSSSTKKTQLQLEHLLLDLQMILNGINNYKNPKLTRMLTFKFYMPKKA |
| | V69A, Q74P- | TELKHLQCLEEELKPLEEALNLAPSKNFHLRPRDLISDINVIVLELKGSE |
| | G4Sx4-Fc | TTFMCEYADETATIVEFLNRWITFSQSIISTLTGGGGGGGGSGGGGSGG |
| | | GGSDKTHTCPPCPAPEAAGAPSVFLFPPKPKDTLMISRTPEVTCVVVDVS |
| | | HEDPEVKFNWYVDGVEVHNAKTKPREEQYNSTYRVVSVLTVLHQDWLNGK |
| | | EYKCKVSNKALPAPIEKTISKAKGQPREPQVYTLPPSREEMTKNQVSLTC |
| | | LVKGFYPSDIAVEWESNGQPENNYKTTPPVLDSDGSFFLYSKLTVDKSRW |
| | | QQGNVFSCSVMHEALHNHYTQKSLSLSPG |
| 58 | Fc-G4S-IL-2 | DKTHTCPPCPAPELLGGPSVFLFPPKPKDTLMISRTPEVTCVVVDVSHED |
| | N88D V69A, | PEVKFNWYVDGVEVHNAKTKPREEQYGSTYRVVSVLTVLHQDWLNGKEYK |
| | Q74P | CKVSNKALPAPIEKTISKAKGQPREPQVYTLPPSREEMTKNQVSLTCLVK |
| | | GFYPSDIAVEWESNGQPENNYKTTPPVLDSDGSFFLYSKLTVDKSRWQQG |
| | | NVFSCSVMHEALHNHYTQKSLSLSPGGGGGSAPTSSSTKKTQLQLEHLLL |
| | | DLQMILNGINNYKNPKLTRMLTFKFYMPKKATELKHLQCLEEELKPLEEA |
| | | LNLAPSKNFHLRPRDLISDINVIVLELKGSETTFMCEYADETATIVEFLN |
| | | RWITFAQSIISTLT |
| 59 | IL-2 N88D | APTSSSTKKTQLQLEHLLLDLQMILNGINNYKNPKLTRMLTFKFYMPKKA |
| | V69A, Q74P, | TEX₁KHX₂QCLEEELKPLEEALNLAPSKNFHX₃RPRDLISDINVIVLELKG |
| | C125S-G4Sx4- | SETTFMCEYADETATIVEFX₄NRWITFSQSIISTLTGGGGSGGGGSGGGGS |
| | Fc, wherein | GGGGSDKTHTCPPCPAPEAAGAPSVFLFPPKPKDTLMISRTPEVTCVVVD |
| | at least one | VSHEDPEVKFNWYVDGVEVHNAKTKPREEQYNSTYRVVSVLTVLHQDWLN |
| | of X₁, X₂, X₃, | GKEYKCKVSNKALPAPIEKTISKAKGQPREPQVYTLPPSREEMTKNQVSL |
| | and X₄ is I | TCLVKGFYPSDIAVEWESNGQPENNYKTTPPVLDSDGSFFLYSKLTVDKS |
| | and the | RWQQGNVFSCSVMHEALHNHYTQKSLSLSPG |
| | remainder are | |
| | L or I. | |
| 60 | IL-2 N88D | APTSSSTKKTQLQLEHLLLDLQMILNGINNYKNPKLTRMLTFKFYMPKKA |
| | V69A, Q74P, | TEX₁KHX₂QCLEEELKPLEEALNLAPSKNFHX₃RPRDLISDINVIVLELKG |
| | C125S, | SETTFMCEYADETATIVEFX4NRWITFSQSIISTLT |
| | wherein at | |
| | least one of | |
| | X₁, X₂, X₃, | |
| | and X₄ is I | |
| | and the | |
| | remainder are | |
| | L or I. | |

[0203] In some embodiments, the sequences shown in the table or throughout comprise or don't comprise one or more mutations that correspond to positions L53, L56, L80, and L118. In some embodiments, the sequences shown in the table or throughout the present application comprise or don't comprise one or more mutations that correspond to positions L59I, L63I, I24L, L94I, L96I or L132I or other substitutions at the same positions. In some embodiments, the mutation is leucine to isoleucine. In some embodiments, the mutein does not comprise another mutation other than as shown or described herein. In some embodiments, the peptide comprises a sequence of SEQ ID NO: 21, SEQ ID NO: 31, SEQ ID NO: 32, SEQ ID NO: 33, SEQ ID NO: 34, SEQ ID NO: 35, SEQ ID NO: 36, SEQ ID NO: 37, SEQ ID NO: 38, SEQ ID NO: 39, SEQ ID NO: 40, SEQ ID NO: 41, SEQ ID NO: 43, SEQ ID NO: 44, SEQ ID NO: 45, SEQ ID NO: 46, SEQ ID NO: 47, SEQ ID NO: 48, SEQ ID NO: 49, SEQ ID NO: 50, SEQ ID NO: 51, SEQ ID NO: 52, SEQ ID NO: 53, SEQ ID NO: 54, SEQ ID NO: 55, or SEQ ID NO: 56, SEQ ID NO: 57, SEQ ID NO: 58, SEQ ID NO: 59, or SEQ ID NO: 60.

[0204] In some embodiments, the protein comprises a IL-2 mutein as provided for herein. In some embodiments, a polypeptide is provided comprising SEQ ID NO: 59 or SEQ ID NO: 60, wherein at least one of X₁, X₂, X₃, and X₄ is I and the remainder are L or I. In some embodiments, X₁, X₂, and X₃ are L and X₄ is I. In some embodiments, X₁, X₂, and X₄ are L and X₃ is I. In some embodiments, X₂, X₃, and X₄ are L and X₁ is I. In some embodiments, X₁, X₃, and X₄ are L and X₂ is I. In some embodiments, X₁ and X₂ are L and X₃ and X₄ are I. In some embodiments, X₁ and X₃ are L and X₂ and X₄ are I. In some embodiments, X₁ and X₄ are L and X₂ and X₃ are I. In some embodiments, X₂ and X₃ are L and X₁ and X₄ are I. In some embodiments, X₂ and X₄ are L and X₁ and X₃ are I. In some embodiments, X₃ and X₄ are L and X₁ and X₂ are I. In some embodiments, X₁, X₂, and X₃ are L and X₄ is I. In some embodiments, X₂, X₃, and X₄ are L and X₁ is I. In some embodiments, X₁, X₃, and X₄ are L and X₂ is I. In some embodiments, X₁, X₂, and X₄ are L and X₃ is I.

[0205] In some embodiments, the Fc portion of the fusion is not included. In some embodiments, the peptide consists essentially of a IL-2 mutein provided for herein. In some embodiments, the protein is free of a Fc portion.

[0206] For illustrative purposes only, embodiments of IL-2 mutein fused with a Fc and with a targeting moiety are illustrated in FIG. 19.

[0207] The sequences are for illustrative purposes only and are not intended to be limiting. In some embodiments, the compound comprises an amino acid sequence of SEQ ID NO: 53, 54, 55, or 56. In some embodiments, the compound comprises an amino acid sequence of SEQ ID NO: 53, 54, 55, or 56 with or without a C125A or C125S mutation. In some embodiments, the residue at position 125 is C, S, or A. In some embodiments, the compound comprises an amino acid sequence of SEQ ID NO: 59 or SEQ ID NO: 60, wherein at least one of X₁, X₂, X₃, and X₄ is I and the remainder are L or I. In some embodiments, the protein comprises a IL-2 mutein as provided for herein. In some embodiments, a polypeptide is provided comprising SEQ ID NO: 59 or SEQ ID NO: 60, wherein at least one of X₁, X₂, X₃, and X₄ is I and the remainder are L or I. In some embodiments, X₁, X₂, and X₃ are L and X₄ is I. In some embodiments, X₁, X₂, and X₄ are L and X₃ is I. In some embodiments, X₂, X₃, and X₄ are L and X₁ is I. In some embodiments, X₁, X₃, and X₄ are L and X₂ is I. In some embodiments, X₁ and X₂ are L and X₃ and X₄ are I. In some embodiments, X₁ and X₃ are L and X₂ and X₄ are I. In some embodiments, X₁ and X₄ are L and X₂ and X₃ are I. In some embodiments, X₂ and X₃ are L and X₁ and X₄ are I. In some embodiments, X₂ and X₄ are L and X₁ and X₃ are I. In some embodiments, X₃ and X₄ are L and X₁ and X₂ are I. In some embodiments, X₁, X₂, and X₃ are L and X₄ is I. In some embodiments, X₂, X₃, and X₄ are L and X₁ is I. In some embodiments, X₁, X₃, and X₄ are L and X₂ is I. In some embodiments, X₁, X₂, and X₄ are L and X₃ is I.

[0208] Each of the proteins may also be considered to have the C125S and the LALA and/or G237A mutations as provided for herein. The C125 substitution can also be C125A as described throughout the present application.

[0209] In an embodiment, an IL-2 mutein molecule comprises at least 60, 70, 80, 85, 90, 95, or 97% sequence identity or homology with a naturally occurring human IL-2 molecule, e.g., a naturally occurring IL-2 sequence disclosed herein or those that incorporated by reference.

[0210] As described herein the IL-2 muteins can be part of a bi-specific molecule with a tethering moiety, such as a MAdCAM antibody that will target the IL-2 mutein to a MAdCAM expressing cell. As described herein, the bispecific molecule can be produced from two polypeptide chains. In some embodiments, the following can be used:

Table of MAdCAM-IL-2 Mutein Bispecific Compounds

| | Chain 1 N-terminal to C-terminal Molecule | | | | Chain 2 N-terminal | |
|---|---|---|---|---|---|---|
| | Component Sequence IDs | | | | to C-terminal | |
| | | Antibody | | | Molecule Component | |
| | | Heavy | | | Sequence IDs | |
| | | Chain | | C- | Light | Light |
| | Antibody VH | CH1-CH2- | | terminal | Chain | Chain |
| Detail | Domain | CH3 Domains | Linker 1 | Moiety | VK Domain | CK Domain |
| 1. Anti- | Rat Anti- | SEQ ID | SEQ ID | SEQ ID | Rat Anti- | SEQ ID |
| MAdCam-Fc- | MAdCam -VH1 | NO: 44 | NO: 23 | NO: 35 | MAdCam -VK1 | NO: 45 |
| IL-2 N88D | | | | | | |
| V69A, Q74P | | | | | | |
| 2. Anti- | Rat Anti- | SEQ ID | SEQ ID | SEQ ID | Rat Anti- | SEQ ID |
| MAdCam - | MAdCam-VH2 | NO: 44 | NO: 23 | NO: 35 | MAdCam -VK2 | NO: 45 |
| Fc-IL-2 | | | | | | |
| N88D V69A, | | | | | | |
| Q74P | | | | | | |
| 3. Anti- | Rat Anti- | SEQ ID | SEQ ID | SEQ ID | Rat Anti- | SEQ ID |
| MAdCam - | MAdCam -VH1 | NO: 44 | NO: 23 | NO: 41 | MAdCam -VK3 | NO: 45 |
| Fc-IL-2 | | | | | | |
| L118I N88D | | | | | | |
| V69A, Q74P | | | | | | |
| 4. TTJ2- | Human TTJ2- | SEQ ID | SEQ ID | SEQ ID | Human TTJ2- | SEQ ID |
| Fc-IL-2 | VH | NO: 44 | NO: 23 | NO: 41 | VK | NO: 45 |
| L118I N88D | | | | | | |
| V69A, Q74P | | | | | | |
| 5. anti | Anti-MAdCam | SEQ ID | SEQ ID | SEQ ID | Anti-MAdCam | SEQ ID |
| hu.MAdCAM- | Human VH3 | NO: 44 | NO: 23 | NO: 41 | Human VK3 | NO: 45 |
| Fc-IL-2 | | | | | | |
| L118I N88D | | | | | | |
| V69A, Q74P | | | | | | |
| 6. anti | Anti-MAdCam | SEQ ID | SEQ ID | SEQ ID | Anti-MAdCam | SEQ ID |
| hu.MAdCAM- | Human VH4 | NO: 44 | NO: 23 | NO: 41 | Human VK4 | NO: 45 |
| Fc-IL-2 | | | | | | |
| L118I N88D | | | | | | |
| V69A, Q74P | | | | | | |
| 7. anti | Anti-MAdCam | SEQ ID | SEQ ID | SEQ ID | Anti-MAdCam | SEQ ID |
| hu.MAdCAM- | Human VH5 | NO: 44 | NO: 23 | NO: 41 | Human VK5 | NO: 45 |
| Fc-IL-2 | | | | | | |
| L118I N88D | | | | | | |
| V69A, Q74P | | | | | | |

[0211] The proteins can be produced with or without a C125A or C125S mutation in the IL-2 mutein. Examples of IL-2 muteins that can be included are illustrated herein, such as, but not limited to, a sequence of SEQ ID NO: 59 or SEQ ID NO: 60.

[0212] In some embodiments, the constant kappa domain in any of the light chains can be replaced with a constant lambda domain.

### GITR-Binders

[0213] GITR (CD357) is a cell surface marker present on Tregs. Blockade of the GITR-GITRL interaction maintains Treg function. In some embodiments, a therapeutic compound comprises an IIC binding entity that binds GITR-expressing Treg cells and a targeting moiety that targets the therapeutic compound to the target tissue of interest.

[0214] In some embodiments, a therapeutic compound comprises an anti-GITR antibody molecule, e.g., anti-GITR antibody molecule that inhibit binding of GITR to GITRL.

[0215] In some embodiments, a therapeutic compound comprises an anti-GITR antibody molecule, anti-GITR antibody molecule that inhibit binding of GITR to GITRL, and PD-1 agonist, IL-2 mutein molecule, or other effector described herein.

[0216] While not wishing to be bound by theory, it is believed that the therapeutic compound that comprises a GITR binder effects accumulation of GITR-expressing Tregs at the site targeted by the targeting moiety of the therapeutic compound, e.g., a transplant or site of organ injury.

### Therapeutic Compounds Comprising an SM Binding/Modulating Moiety: Manipulation of Local Microenvironment

[0217] A therapeutic compound can comprise an effector binding/modulating moiety that promotes an immuno-suppressive local microenvironment, e.g., by providing in the proximity of the target, a substance that inhibits or minimizes attack by the immune system of the target, referred to herein a SM binding/modulating moiety.

[0218] In some embodiments, the SM binding/modulating moiety comprises a molecule that inhibits or minimizes attack by the immune system of the target (referred to herein as an SM binding/modulating moiety). In some embodiments, a therapeutic compound comprises an SM binding/modulating moiety that binds and accumulates a soluble substance, e.g., an endogenous or exogenous substance having immunosuppressive function. In some embodiments, a therapeutic compound comprises an SM binding/modulating moiety, e.g., a CD39 molecule or a CD73 molecule or alkaline phosphatase molecule, that binds, inhibits, sequesters, degrades or otherwise neutralizes a soluble substance, typically and endogenous soluble substance, e.g., ATP in the case of a CD39 molecule or alkaline phosphatase molecule, or AMP in the case of a CD73 molecule, that promotes immune attack. In some embodiments, a therapeutic compound comprises an SM binding/modulating moiety that comprises an immune-suppressive substance, e.g. a fragment of protein that is immunosuppressive.

### Therapeutic Compounds Comprising an ICSM Binding/Modulating Moiety: Inhibition of Stimulation, e.g., Inhibition of Co-Stimulation of Immune Cells

[0219] A therapeutic compound can comprise an ICSM binding/modulating moiety that inhibits or antagonizes a stimulatory, e.g., co-stimulatory binding pair, e.g., OX40 and OX40L. The ICSM binding/modulating moiety can bind and antagonize either member of the pair.

[0220] In an embodiment, the ICSM binding/modulating moiety comprises an antibody molecule that binds and antagonizes either member of a stimulatory, e.g., co-stimulatory binding pair. In an embodiment the ICSM binding/modulating moiety comprises antagonistic analog of one of the members of the binding pair. In such embodiments the ICSM binding/modulating moiety can comprise a soluble fragment of one of the members that binds the other. Typically the analog will have at least 50, 60, 70, 80, 90, 95, or 98% homology or sequence identity with a naturally occurring member that binds the target member of the pair. In the case of an ICSM binding/modulating moiety that binds the member present on the surface of an immune cell, the ICSM binding/modulating moiety typically binds but does not activate, or allow endogenous counter member to bind and activate.

[0221] Thus, in the case of the binding pair that includes, for example, the OX40 immune cell member and the OX40L counter member, an ICSM binding/modulating member can comprise any of the following:
[0222] a) an antibody molecule that binds the OX40 immune cell member and antagonizes stimulation, e.g., by blocking binding of endogenous OX40L counter member;
[0223] b) an antibody molecule that binds OX40L counter member and antagonizes stimulation, e.g., by blocking effective binding of the endogenous OX40L counter member to the OX40 immune cell member;
[0224] c) a soluble fragment or analog of OX40L counter member which binds OX40 immune cell member and antagonizes stimulation; and
[0225] c) a soluble fragment or analog of OX40 immune cell member which binds OX40L counter member and antagonizes stimulation.

[0226] For example, the ICSM binding/modulating moiety, e.g., an antibody molecule or an antagonistic analog or of the counter member, can bind to CD2, ICOS, CD40L, CD28, LFA1, SLAM, TIM1, CD30, OX40 (CD134), 41BB (CD137), CD27, HVEM, DR3, GITR, BAFFR, TACI, BCMA, or CD30, CD40. In another embodiment, the ICSM binding/modulating moiety, e.g., an antibody molecule or an antagonistic analog or of the counter member, can bind to B7.1, B7.2, ICOSL (B7-H2, B7RP1), LFA3, CD48, CD58, ICAM1, SLAM, TIM4, CD40, CD30L, OX40L (CD252), 41BBL (CD137L), CD70, LIGHT, TL1A, GITRL, BAFF, APRIL, or CD30, CD40L.

[0227] In some embodiments, the ICSM binding/modulating molecule binds, and antagonizes, an activating or costimulatory molecule, e.g., a costimulatory molecule, present on an immune cell, or binds the counter member preventing the counter member from activating the costimulatory molecule present on the immune cell. In some embodiments, the ICSM comprises an antagonistic antibody molecule e.g., an antibody molecule that binds the costimulatory molecule on an immune cell or binds the counter member of the ICSM, preventing the counter member from activating the costimulatory molecule on the immune cell, and results in inhibiting the activity of the costimulatory molecule. In some embodiments, the ICSM comprises an antagonistic counterpart molecule, e.g., a fragment of a molecule that binds the costimulatory molecule, and results in the inhibition of the costimulatory molecule activity.

[0228] In some embodiments, one member of the binding pair will be on the surface of an immune cell, e.g., a T, B, or NK cell or dendritic cell, while the counter member will be on another immune cell, or an APC such as a dendritic cell or on non-immune cells such as smooth cells, or endothelial cells.

[0229] The following table provides non-limiting examples of costimulatory molecule and counter structure pairs:

TABLE 4
Costimulatory molecule and counterstructure pairs

| Costimulatory | |
|---|---|
| Molecule (e.g. on T | |
| cells) | Counterstructure |
| CD28 | B7.1 or B7.2 |
| ICOS | ICOSL (B7H-2, B7RP1) |
| CD2 | LFA3, CD48, CD58 |
| LFA1 | ICAM1 |
| SLAM | SLAM |
| TIM1 | TIM4 |
| CD40L | CD40 |
| CD30 | CD30L |
| OX40/CD134 | OX40L (CD252) |
| 41BB/CD137 | 41BBL (CD137L) |
| CD27 | CD70 |
| HVEM | LIGHT |
| DR3 | TL1A |
| GITR | GITRL |

| Costimulatory | |
|---|---|
| Molecule (e.g. on B | |
| cells) | Counterstructure |
| BAFFR | BAFF |
| TACI | BAFF and APRIL |
| BCMA | BAFF and APRIL |
| CD40 | CD40L |
| CD30L | CD30 |

### Donor Tissue

[0230] Therapeutic compounds and methods described herein can be used in conjunction with a transplantation of donor tissue into a subject and can minimizes rejection of, minimizes immune effector cell mediated damage to, prolongs acceptance of, or prolongs the functional life of, donor transplant tissue. The tissue can be xenograft or allograft tissue. Transplanted tissue can comprise all or part of an organ, e.g., a liver, kidney, heart, pancreas, thymus, skin or lung. In embodiments, therapeutic compounds described herein reduce, or eliminate the need for systemic immune suppression. Therapeutic compounds and methods described herein can also be used to treat GVHD. In some embodiments, host cells are coated with a therapeutic compound that comprises, as an effector binding/modulating moiety, a PD-L1 molecule.

[0231] Table 5 provides target molecules for transplant indications. A target molecule is the target to which a targeting moiety binds. As discussed elsewhere herein, In some embodiments, a targeting moiety is selected that binds a product of an allele present on donor tissue and which is not expressed by the subject (recipient) or at expressed at a different level (e.g. reduced or substantially reduced).

TABLE 5
Target Molecules for Transplant Indications

| | Organ/ | |
|---|---|---|
| | cell | |
| Indication | type | Target |
| Allograft transplant tissue, | All | HLA-A, HLA-B, HLA-C, |
| e.g., allograft solid organ | | HLA-DP, HLA-DQ or HLA- |
| transplant, GvHD | | DR |
| Transplant | Kidney | Antigens expressed in the |
| | | kidney where immune cells |
| | | infiltrate, for example |
| | | including but not limited to |
| | | the tubular interstitial |
| | | region e.g. Uromodulin, |
| | | SLC22A2, SLC22A6, FXYD4, |
| | | SLC5A10, SLC6A13, AQP6, |
| | | SLC13A3, TMEM72, BSND, |
| | | NPR3, and the proximal and |
| | | distal tubular epithelium, |
| | | such as OAT1, OCT2 |

### Auto-Immune Disorders

[0232] Therapeutic compounds and methods described herein can be used to treat a subject having or at risk for having an unwanted autoimmune response, e.g., an auto immune response in Type 1 Diabetes, Multiple Sclerosis, Cardiomyositis, vitiligo, alopecia, inflammatory bowel disease (IBD, e.g. Crohn's disease or ulcerative colitis), Sjogren's syndrome, focal segmented glomerular sclerosis (FSGS), scleroderma/systemic sclerosis (SSc) or rheumatoid arthritis. In some embodiments, the treatment minimizes rejection of, minimizes immune effector cell mediated damage to, prolongs the survival of subject tissue undergoing, or a risk for, autoimmune attack. Table 2 provides target molecules for several autoimmune indications and organ/cell types. A target molecule is the target to which a targeting moiety binds.

TABLE 2
Target Molecules for autoimmune indications

| Indication | Organ/cell type | Target Molecule |
|---|---|---|
| Type 1 Diabetes and | Pancreas/Pancreatic islets, | SEZ6L2, LRP11, DISP2, |
| Transplant | beta cells | SLC30A8, FXYD2 TSPAN7 |
| | | TMEM27 (reference Hald et |
| | | al. 2012 Diabetelogia |
| | | 55: 154); FXYD2; GPR119; |
| | | HEPACAM2, |
| | | DPP6, or MAdCAM |
| Multiple Sclerosis | CNS/myelin sheath of | MOG, PLP, MBP |
| | oligodendrocytes | |
| Cardiomyositis, rheumatoid | Cardiomyocytes, monocytes, | SIRPA (CD172a) |
| arthritis | macrophages, myeloid cells | |
| Inflammatory bowel disease | Intestine | MAdCAM |
| (ulcerative colitis, Crohn's | | |
| disease) or GVHD; Celiac | | |
| disease | | |
| Autoimmune hepatitis (AIH); | liver | MAdCAM |
| Primary Sclerosing | | |
| Cholangitis (PSC); | | |
| Primary Biliary Sclerosis; | | |
| (PBC); | | |
| transplant | | |
| Focal Segmented Glomerular | Kidney, podocytes, tubules, | COL1A1, Cadherin 2, |
| Sclerosis (FSGS) and other | epithelial cells | VCAM-1, Thy1, Podocin, |
| diseases that can affect | | KIM1 (Hodgin et al, Am J |
| kidney for example lupus | | Pathol 177: 1675 2010); |
| nephritis, systemic | | PLA2R; OAT1; OCT2; K- |
| scleroderma, membranous | | cadherin 6; CDH16 |
| glomerular nephropathy | | |
| (MGN); Membranous | | |
| nephropathy (MN); Minimal | | |
| Change Disease (MCD); IgA | | |
| nephropathy; ANCA- | | |
| associated vasculitis (AAV) | | |
| Sjogren's syndrome | Salivary glands, epithelial | FCGR3B, HLAB, KIM1 (Hu |
| | cells, kidney | et al Arth and Rheum |
| | | 56: 3588 2007 |
| Scleroderma, systemic | skin, kidney, lung, | Collagen I, III, VI, VII, |
| sclerosis (SSc) | Fibroblasts, connective tissue | fibronectin (Wang et al Arth |
| | | and Rheum 54: 2271 2006) |
| vitiligo | Skin, epidermis, Langerhans | COL17A1, CD1A, CD207, |
| | cells, keratinocytes, | desmoglein 1-4, keratin 1 |
| | melanocytes | |
| Alopecia areata | Skin, Hair follicle/hair bulb, | CD133 (Yang and Cotsarelis, |
| | dermis | J Dermatol Sci 57: 2 2010) |

[0233] Other examples of autoimmune disorders and diseases that can be treated with the compounds described herein include, but are not limited to, Myocarditis, Postmyocardial infarction syndrome, Postpericardiotomy syndrome, Subacute bacterial endocarditis, Anti-Glomerular Basement Membrane nephritis, Interstitial cystitis, Lupus nephritis, membranous glomerulonephropathy, Chronic Kidney Disease (“CKD”), Autoimmune hepatitis, Primary biliary cirrhosis, Primary sclerosing cholangitis, Antisynthetase syndrome, alopecia areata, autoimmune angioedema, autoimmune progesterone dermatitis, autoimmune urticaria, bullous pemphigoid, cicatricial pemphigoid, dermatitis herpetiformis, discoid lupus erythematosus, epidermolysis bullosa acquisita, erythema nodosum, gestational pemphigoid, hidradenitis suppurativa, lichen planus, lichen sclerosus, linear iga disease (lad), morphea, Pemphigus vulgaris, Pityriasis lichenoides et varioliformis acuta, mucha-habermann disease, psoriasis, systemic scleroderma, vitiligo, Addison's disease, Autoimmune polyendocrine syndrome (APS) type 1, Autoimmune polyendocrine syndrome (APS) type 2, Autoimmune polyendocrine syndrome (APS) type 3, Autoimmune pancreatitis (AIP), Diabetes mellitus type 1, Autoimmune thyroiditis, Ord's thyroiditis, Graves' disease, Autoimmune Oophoritis, Endometriosis, Autoimmune orchitis, Sjogren's syndrome, Autoimmune enteropathy, Coeliac disease, Crohn's disease, Microscopic colitis, Ulcerative colitis, thrombocytopenia, Adiposis, dolorosa, Adult-onset Still's, disease, Ankylosing, Spondylitis, CREST syndrome, Drug-induced lupus, Enthesitis-related arthritis, Eosinophilic fasciitis, Felty syndrome, IgG4-related disease, Juvenile, Arthritis, Lyme disease (Chronic), Mixed connective tissue disease (MCTD), Palindromic rheumatism, Parry Romberg syndrome, Parsonage-Turner syndrome, Psoriatic arthritis, Reactive arthritis, Relapsing polychondritis, Retroperitoneal fibrosis, Rheumatic fever, Rheumatoid arthritis, Sarcoidosis, Schnitzler syndrome, Systemic Lupus Erythematosus (SLE), Undifferentiated connective tissue disease (UCTD), Dermatomyositis, Fibromyalgia, Inclusion body myositis, Myositis, Myasthenia gravis, Neuromyotonia, Paraneoplastic cerebellar degeneration, Polymyositis, Acute disseminated encephalomyelitis (ADEM), Acute motor axonal neuropathy, Anti-N-Methyl-D-Aspartate (anti-NMDA) Receptor Encephalitis, Balo concentric sclerosis, Bickerstaff's encephalitis, Chronic inflammatory demyelinating polyneuropathy, Guillain-Barre syndrome, Hashimoto's encephalopathy, Idiopathic inflammatory demyelinating diseases, Lambert-Eaton myasthenic syndrome, Multiple sclerosis, Oshtoran syndrome, Pediatric Autoimmune Neuropsychiatric Disorder Associated with Streptococcus (PANDAS), Progressive inflammatory neuropathy, Restless leg syndrome, Stiff person syndrome, Sydenham chorea, Transverse myelitis, Autoimmune retinopathy, Autoimmune uveitis, Cogan syndrome, Graves ophthalmopathy, Intermediate uveitis, Ligneous conjunctivitis, Mooren's ulcer, Neuromyelitis optica, Opsoclonus myoclonus syndrome, Optic neuritis, Scleritis, Susac's syndrome, Sympathetic ophthalmia, Tolosa-Hunt syndrome, Autoimmune inner ear disease (AIED), Ménière's disease, Behcet's disease, Eosinophilic granulomatosis with polyangiitis (EGPA), Giant cell arteritis, Granulomatosis with polyangiitis (GPA), IgA vasculitis (IgAV), Kawasaki's disease, Leukocytoclastic vasculitis, Lupus vasculitis, Rheumatoid vasculitis, Microscopic polyangiitis (MPA), Polyarteritis nodosa (PAN), Polymyalgia rheumatica, Vasculitis, Primary Immune Deficiency, and the like.

[0234] Other examples of potential autoimmune disorders and diseases, as well as autoimmune comorbidities that can be treated with the compounds described herein include, but are not limited to, Chronic fatigue syndrome, Complex regional pain syndrome, Eosinophilic esophagitis, Gastritis, Interstitial lung disease, POEMS syndrome, Raynaud's phenomenon, Primary immunodeficiency, Pyoderma gangrenosum, Agammaglobulinemia, Amyloidosis, Amyotrophic lateral sclerosis, Anti-tubular basement membrane nephritis, Atopic allergy, Atopic dermatitis, Autoimmune peripheral neuropathy, Blau syndrome, Castleman's disease, Chagas disease, Chronic obstructive pulmonary disease, Chronic recurrent multifocal osteomyelitis, Complement component 2 deficiency, Contact dermatitis, Cushing's syndrome, Cutaneous leukocytoclastic angiitis, Dego' deiase, Eczema, Eosinophilic gastroenteritis, Eosinophilic pneumonia, Erythroblastosis fetalsis, Fibrodysplasia ossificans progressive, Gastrointestinal pemphigoid, Hypogammaglobulinemia, Idiopathic giant-cell myocarditis, Idiopathic pulmonary fibrosis, IgA nephropathy, Immunoregulatory lipoproteins, IPEX syndrome, Ligenous conjunctivitis, Majeed syndrome, Narcolepsy, Rasmussen's encephalitis, Schizophrenia, Serum sickness, Spondyloarthropathy, Sweet's syndrome, Takayasu's arteritis, and the like.

[0235] In some embodiments, the autoimmune disorder does not comprise Pemphigus vulgaris, Pemphigus. In some embodiments, the autoimmune disorder does not comprise Pemphigus foliaceus. In some embodiments, the autoimmune disorder does not comprise bullous pemphigoid. In some embodiments, the autoimmune disorder does not comprise Goodpasture's Disease. In some embodiments, the autoimmune disorder does not comprise psoriasis. In some embodiments, the autoimmune disorder does not comprise a skin disorder. In some embodiments, the disorder does not comprise a neoplastic disorder, e.g., cancer.

### Therapeutic Compounds

[0236] A therapeutic compound comprises a specific targeting moiety functionally associated with an effector binding/modulating moiety. In some embodiments, the specific targeting moiety and effector binding/modulating moiety are linked to one another by a covalent or noncovalent bond, e.g., a covalent or non-covalent bond directly linking the one to the other. In other embodiments, a specific targeting moiety and effector binding/modulating moiety are linked, e.g., covalently or noncovalently, through a linker moiety. E.g., in the case of a fusion polypeptide, a polypeptide sequence comprising the specific targeting moiety and a polypeptide sequence can be directly linked to one another or linked through one or more linker sequences. In some embodiments, the linker moiety comprises a polypeptide. Linkers are not, however, limited to polypeptides. In some embodiments, a linker moiety comprises other backbones, e.g., a non-peptide polymer, e.g., a PEG polymer. In some embodiments, a linker moiety can comprise a particle, e.g., a nanoparticle, e.g., a polymeric nanoparticle. In some embodiments, a linker moiety can comprise a branched molecule, or a dendrimer. However, in embodiments where the effector binding/modulating moiety comprises an ICIM binding/modulating moiety (which binds an effector like PD-1) structures that result in clustering in the absence of target binding should be avoided as they may cause clustering in the absence of target binding. Thus in embodiments, the therapeutic compound has a structure, e.g., the copies of an WWI are sufficiently limited, such that clustering in the absence of target binding is minimized or substantially eliminated, or eliminated, or is sufficiently minimized that substantial systemic immune suppression does not occur.

[0237] In some embodiments, the disclosure provides for use of a polypeptide or antibody as provided for herein, or a pharmaceutical composition comprising the same, for the manufacture of a medicament for the treatment of inflammatory bowel disease.

[0238] In some embodiments, the disclosure provides for use of a polypeptide or antibody as provided for herein, or a pharmaceutical composition comprising the same, for the manufacture of a medicament for the treatment of inflammatory bowel disease, such as Crohn's disease, or ulcerative colitis.

[0239] In some embodiments, the disclosure provides for use of a polypeptide or antibody as provided for herein, or a pharmaceutical composition comprising the same, for the manufacture of a medicament for the treatment of Crohn's disease, or ulcerative colitis.

[0240] In some embodiments, the disclosure provides for use of a polypeptide or antibody as provided for herein, or a pharmaceutical composition comprising the same, for the manufacture of a medicament for the treatment of an auto-immune hepatitis, a primary sclerosing cholangitis, a Type 1 diabetes, a transplant, a GVHD, an elevated risk, or a risk, for having, an autoimmune disorder.

[0241] In some embodiments, the disclosure provides for use of a polypeptide or antibody as provided for herein, or a pharmaceutical composition comprising the same, for the treatment of inflammatory bowel disease.

[0242] In some embodiments, the disclosure provides for use of a polypeptide or antibody as provided for herein, or a pharmaceutical composition comprising the same, for the treatment of an auto-immune hepatitis, a primary sclerosing cholangitis, a Type 1 diabetes, a transplant, a GVHD, an elevated risk, or a risk, for having, an autoimmune disorder.

[0243] In some embodiments, a therapeutic compound comprises a polypeptide comprising a specific targeting moiety covalently or non-covalently conjugated to an effector binding/modulating moiety. In some embodiments, a therapeutic molecule comprises a fusion protein having comprising a specific targeting moiety fused, e.g., directly or through a linking moiety comprising one or more amino acid residues, to an effector binding/modulating moiety. In some embodiments, a therapeutic molecule comprises a polypeptide comprising a specific targeting moiety linked by a non-covalent bond or a covalent bond, e.g., a covalent bond other than a peptide bond, e.g., a sulfhydryl bond, to an effector binding/modulating moiety.

[0244] In some embodiments, a therapeutic compound comprises polypeptide, e.g., a fusion polypeptide, comprising:
[0245] 1.a) a specific targeting moiety comprising a target specific binding polypeptide;
[0246] 1.b) a specific targeting moiety comprising a target ligand binding molecule;
[0247] 1.c) a specific targeting moiety comprising an antibody molecule;
[0248] 1.d) a specific targeting moiety comprising a single chain antibody molecule, e.g., a scFv domain; or
[0249] 1.e) a specific targeting moiety comprising a first of the light or heavy chain variable region of an antibody molecule, and wherein the other variable region is covalently or non-covalently associated with the first; and
[0250] 2.a) an effector binding/modulating moiety comprising an effector specific binding polypeptide;
[0251] 2.b) an effector binding/modulating moiety comprising an effector ligand binding molecule;
[0252] 2.c) an effector binding/modulating moiety comprising an antibody molecule;
[0253] 2.d) an effector binding/modulating moiety comprising a single chain antibody molecule, e.g., a scFv domain; or
[0254] 2.e) an effector binding/modulating moiety comprising a first of the light or heavy chain variable region of an antibody molecule, and wherein the other variable region is covalently or non-covalently associated with the first.

[0255] In some embodiments, a therapeutic compound comprises 1.a and 2.a.

[0256] In some embodiments, a therapeutic compound comprises 1.a and 2.b.

[0257] In some embodiments, a therapeutic compound comprises 1.a and 2.c.

[0258] In some embodiments, a therapeutic compound comprises 1.a and 2.d.

[0259] In some embodiments, a therapeutic compound comprises 1.a and 2.e.

[0260] In some embodiments, a therapeutic compound comprises 1.b and 2.a.

[0261] In some embodiments, a therapeutic compound comprises 1.b and 2.b.

[0262] In some embodiments, a therapeutic compound comprises 1.b and 2.c.

[0263] In some embodiments, a therapeutic compound comprises 1.b and 2.d.

[0264] In some embodiments, a therapeutic compound comprises 1.b and 2.e.

[0265] In some embodiments, a therapeutic compound comprises 1.c and 2.a.

[0266] In some embodiments, a therapeutic compound comprises 1.c and 2.b.

[0267] In some embodiments, a therapeutic compound comprises 1.c and 2.c.

[0268] In some embodiments, a therapeutic compound comprises 1.c and 2.d.

[0269] In some embodiments, a therapeutic compound comprises 1.c and 2.e.

[0270] In some embodiments, a therapeutic compound comprises 1.d and 2.a.

[0271] In some embodiments, a therapeutic compound comprises 1.d and 2.b.

[0272] In some embodiments, a therapeutic compound comprises 1.d and 2.c.

[0273] In some embodiments, a therapeutic compound comprises 1.d and 2.d.

[0274] In some embodiments, a therapeutic compound comprises 1.d and 2.e.

[0275] In some embodiments, a therapeutic compound comprises 1.e and 2.a.

[0276] In some embodiments, a therapeutic compound comprises 1.e and 2.b.

[0277] In some embodiments, a therapeutic compound comprises 1.e and 2.c.

[0278] In some embodiments, a therapeutic compound comprises 1.e and 2.d.

[0279] In some embodiments, a therapeutic compound comprises 1.e and 2.e.

[0280] Therapeutic compounds disclosed herein can, for example, comprise a plurality of effector binding/modulating and specific targeting moieties. Any suitable linker or platform can be used to present the plurality of moieties. The linker is typically coupled or fused to one or more effector binding/modulating and targeting moieties.

[0281] In some embodiments, two (or more) linkers associate, either covalently or non-covalently, e.g., to form a hetero or homo-dimeric therapeutic compound. E.g., the linker can comprise an Fc region and two Fc regions associate with one another. In some embodiments of a therapeutic compound comprising two linker regions, the linker regions can self-associate, e.g., as two identical Fc regions. In some embodiments of a therapeutic compound comprising two linker regions, the linker regions are not capable of, or not capable of substantial, self-association, e.g., the two Fc regions can be members of a knob and hole pair.

[0282] Non-limiting exemplary configurations of therapeutic compounds comprise the following (e.g., in N to C terminal order):
[0283] R1—Linker Region A—R2
[0284] R3—Linker Region B—R4,
   wherein,

[0285] R1, R2, R3, and R4, each independently comprises an effector binding/modulating moiety, e.g., an ICIM binding/modulating moiety, an IIC binding/modulating moiety, ICSM binding/modulating moiety, or an SM binding/modulating moiety; a specific targeting moiety; or is absent, provided that at least one of R1 and R2 is not absent, and at least one of R3 and R4 is not absent;

[0286] Linker Region A and Linker B comprise moieties that can associate with one another, e.g., Linker A and Linker B each comprises an Fc moiety provided that an effector binding/modulating moiety and a specific targeting moiety are present.

[0287] In some embodiments, the polypeptide having the formula of R1—Linker Region A—R2 and the polypeptide having the formula of R3—Linker Region B—R4 interact with one another to form a polypeptide complex. In some embodiment, the polypeptide having the formula of R1—Linker Region A—R2 and the polypeptide having the formula of R3—Linker Region B—R4 do not interact with one another to form a polypeptide complex.

[0288] In Some Embodiments:
[0289] R1 comprises an effector binding/modulating moiety, e.g., an ICIM binding/modulating moiety, an IIC binding/modulating moiety, ICSM binding/modulating moiety, or an SM binding/modulating moiety, or is absent;
[0290] R2 comprises a specific targeting moiety, or is absent;
[0291] R3 comprises an effector binding/modulating moiety, e.g., an ICIM binding/modulating moiety, an IIC binding/modulating moiety, ICSM binding/modulating moiety, or an SM binding/modulating moiety, or is absent;
[0292] R4 comprises a specific targeting moiety, or is absent;

[0293] Linker Region A and Linker B comprise moieties that can associate with one another, e.g., Linker A and Linker B each comprises an Fc moiety, provided that one of R1 or R3 is present and one of R2 or R4 is present.

[0294] In Some Embodiments:
[0295] R1 comprises a specific targeting moiety, or is absent;
[0296] R2 comprises an effector binding/modulating moiety, e.g., an ICIM binding/modulating moiety, an IIC binding/modulating moiety, ICSM binding/modulating moiety, or an SM binding/modulating moiety, or is absent;
[0297] R3 comprises a specific targeting moiety, or is absent;
[0298] R4 comprises an effector binding/modulating moiety, e.g., an ICIM binding/modulating moiety, an IIC binding/modulating moiety, ICSM binding/modulating moiety, or an SM binding/modulating moiety, or is absent;

[0299] Linker Region A and Linker B comprise moieties that can associate with one another, e.g., Linker A and Linker B each comprises an Fc moiety, provided that one of R1 or R3 is present and one of R2 or R4 is present.

Non-limiting examples include, but are not limited to:

| | Linker | | | Linker Region | | |
|---|---|---|---|---|---|---|
| R1 | Region A | R2 | R3 | B | R4 | Other |
| HCVR and | Fc Region | scFv | HCVR | Fc Region | scFv | Self-Pairing |
| LCVR | | | and | | | Linker Regions |
| | | | LCVR | | | |
| HCVR and | Fc Region | scFv | HCVR | Fc Region | scFv | Non-Self |
| LCVR | | | and | | | Pairing linker |
| | | | LCVR | | | regions |
| HCVR and | Fc Region | scFv | HCVR | Fc Region | scFv | Self-Pairing |
| LCVR (or | | | and | | | Linker Regions |
| absent) | | | LCVR | | | One of R1 or |
| | | | (or | | | R3 is absent. |
| | | | absent) | | | |
| HCVR and | Fc Region | scFv | HCVR | Fc Region | scFv | Non-Self |
| LCVR (or | | | and | | | Pairing Linker |
| absent) | | | LCVR | | | Regions |
| | | | (or | | | One of R1 or |
| | | | absent) | | | R3 is absent. |
| HCVR and | Fc Region | scFv (or | HCVR | Fc Region | scFv (or | Self-Pairing |
| LCVR | | absent) | and | | absent) | linker regions |
| | | | LCVR | | | One of R2 or |
| | | | | | | R4 is absent. |
| HCVR and | Fc Region | scFv (or | HCVR | Fc Region | scFv (or | Non-Self |
| LCVR | | absent) | and | | absent) | Pairing linker |
| | | | LCVR | | | regions |
| | | | | | | One of R2 or |
| | | | | | | R4 is absent. |
| HCVR and | Fc Region | scFv | HCVR | Fc Region | scFv | Self-Pairing |
| LCVR | | | and | | | Linker Regions |
| | | | LCVR | | | R1 and R3 are |
| | | | | | | the same |
| HCVR and | Fc Region | scFv | HCVR | Fc Region | scFv | Non-Self |
| LCVR | | | and | | | Pairing linker |
| | | | LCVR | | | regions |
| | | | | | | Rland R3 are |
| | | | | | | different |
| HCVR and | Fc Region | scFv | HCVR | Fc Region | scFv | Self-Pairing |
| LCVR | | | and | | | Linker Regions |
| | | | LCVR | | | R2 and R4 are |
| | | | | | | the same |
| HCVR and | Fc Region | scFv | HCVR | Fc Region | scFv | Non-Self |
| LCVR | | | and | | | Pairing linker |
| | | | LCVR | | | regions |
| | | | | | | R2and R4 are |
| | | | | | | different |

HCVR and LCVR: refers to an moiety comprising an antigen binding portion of a heavy and light chain variable region, typically with the heavy chain fused to the Linker region.
Self-pairing: wherein a liker region can pair with itself, e.g., an Fc region that can pair a copy of itself.
Non-Self Pairing: wherein a Linker Region does not pair with itself, or does not substantially pair with itself, e.g., an Fc region does not or does not significantly pair with itself, e.g., wherein Linker Region A and Linker Region B are members of a knob and hole pair.

[0300] In Some Embodiments:
[0301] R1, R2, R3 and R4 each independently comprise: an effector binding modulating moiety that activates an inhibitory receptor on an immune cell, e.g., a T cell or a B cell, e.g., a PD-L1 molecule or a functional anti-PD-1 antibody molecule (an agonist of PD-1); a specific targeting moiety; or is absent, provided that at least one of R1 and R2 is not absent, and at least one of R3 and R4 is not absent;
[0302] provided that an effector binding moiety and a specific targeting moiety are present.

[0303] In some embodiments, Linker A and Linker B comprise Fc moieties (e.g., self-pairing Fc moieties).

[0304] In Some Embodiments:
[0305] R1 and R3 independently comprise an effector binding modulating moiety that activates an inhibitory receptor on an immune cell, e.g., a T cell or a B cell, e.g., a PD-L1 molecule or an functional anti-PD-1 antibody molecule (an agonist of PD-1); and
[0306] R2 and R4 independently comprise specific targeting moieties, e.g., scFv molecules against a tissue antigen.

[0307] In some embodiments, Linker A and Linker B comprise Fc moieties (e.g., self-pairing Fc moieties).

[0308] In Some Embodiments:
[0309] R1 and R3 independently comprise a functional anti-PD-1 antibody molecule (an agonist of PD-1); and
[0310] R2 and R4 independently comprise specific targeting moieties, e.g., scFv molecules against a tissue antigen.

[0311] In some embodiments, Linker A and Linker B comprise Fc moieties (e.g., self-pairing Fc moieties).

[0312] In Some Embodiments:
[0313] R1 and R3 independently comprise specific targeting moieties, e.g., an anti-tissue antigen antibody; and
[0314] R2 and R4 independently comprise a functional anti-PD-1 antibody molecule (an agonist of PD-1), e.g., an scFv molecule.

[0315] In some embodiments, Linker A and Linker B comprise Fc moieties (e.g., self-pairing Fc moieties).

[0316] In Some Embodiments:
[0317] R1 and R3 independently comprise a PD-L1 molecule (an agonist of PD-1); and
[0318] R2 and R4 independently comprise specific targeting moieties, e.g., scFv molecules against a tissue antigen; and

[0319] In some embodiments, Linker A and Linker B comprise Fc moieties (e.g., self-pairing Fc moieties).

[0320] In Some Embodiments:
[0321] R1 and R3 independently comprise specific targeting moieties, e.g., an anti-tissue antigen antibody; and
[0322] R2 and R4 independently comprise a PD-L1 molecule (an agonist of PD-1).

[0323] In some embodiments, Linker A and Linker B comprise Fc moieties (e.g., self-pairing Fc moieties).

[0324] In Some Embodiments:
[0325] R1, R2, R3 and R4 each independently comprise: an SM binding/modulating moiety which modulates, e.g., binds and inhibits, sequesters, degrades or otherwise neutralizes a substance, e.g., a soluble molecule that modulates an immune response, e.g., ATP or AMP, e.g., a CD39 molecule or a CD73 molecule; a specific targeting moiety; or is absent, provided that at least one of R1 and R2 is not absent, and at least one of R3 and R4 is not absent; provided that an SM binding/modulating moiety and a specific targeting moiety are present.

[0326] In some embodiments, Linker A and Linker B comprise Fc moieties (e.g., self-pairing Fc moieties or Fc moieties that do not, or do not substantially self-pair).

[0327] In Some Embodiments:
[0328] R1 and R3 independently comprise an SM binding/modulating moiety which modulates, e.g., binds and inhibits, sequesters, degrades or otherwise neutralizes a substance, e.g., a soluble molecule that modulates an immune response, e.g., ATP or AMP, e.g., a CD39 molecule or a CD73 molecule; and
[0329] R2 and R4 independently comprise specific targeting moieties, e.g., scFv molecules against a tissue antigen.

[0330] In some embodiments, Linker A and Linker B comprise Fc moieties (e.g., self-pairing Fc moieties or Fc moieties that do not, or do not substantially self-pair).

[0331] In Some Embodiments:
[0332] R1 and R3 independently comprise a CD39 molecule or a CD73 molecule; and
[0333] R2 and R4 independently comprise specific targeting moieties, e.g., scFv molecules against a tissue antigen.

[0334] In some embodiments, Linker A and Linker B comprise Fc moieties (e.g., self-pairing Fc moieties or Fc moieties that do not, or do not substantially self-pair).

[0335] In Some Embodiments:
[0336] R1 and R3 each comprises a CD39 molecule; and
[0337] R2 and R4 independently comprise specific targeting moieties, e.g., scFv molecules against a tissue antigen; and
[0338] In some embodiments, Linker A and Linker B comprise Fc moieties (e.g., self-pairing Fc moieties or Fc moieties that do not, or do not substantially self-pair).

[0339] In Some Embodiments:
[0340] R1 and R3 each comprises a CD73 molecule; and
[0341] R2 and R4 independently comprise specific targeting moieties, e.g., scFv molecules against a tissue antigen.

[0342] In some embodiments, Linker A and Linker B comprise Fc moieties (e.g., self-pairing Fc moieties or Fc moieties that do not, or do not substantially self-pair).

[0343] In Some Embodiments:
[0344] One of R1 and R3 comprises a CD39 molecule and the other comprises a CD73 molecule; and
[0345] R2 and R4 independently comprise specific targeting moieties, e.g., scFv molecules against a tissue antigen.

[0346] In some embodiments, Linker A and Linker B comprise Fc moieties (e.g., self-pairing Fc moieties or Fc moieties that do not, or do not substantially self-pair).

[0347] In Some Embodiments:
[0348] R1, R2, R3 and R4 each independently comprise: an HLA-G molecule; a specific targeting moiety; or is absent;
[0349] provided that an HLA-G molecule and a specific targeting moiety are present.

[0350] In some embodiments, Linker A and Linker B comprise Fc moieties (e.g., self-pairing Fc moieties or Fc moieties that do not, or do not substantially self-pair).

[0351] In Some Embodiments:
[0352] R1 and R3 each comprise an HLG-A molecule; and
[0353] R2 and R4 independently comprise specific targeting moieties, e.g., scFv molecules against a tissue antigen.

[0354] In some embodiments, Linker A and Linker B comprise Fc moieties (e.g., self-pairing Fc moieties or Fc moieties that do not, or do not substantially self-pair).

[0355] In Some Embodiments:
[0356] R1 and R3 each comprise an agonistic anti-LILRB1 antibody molecule; and
[0357] R2 and R4 independently comprise specific targeting moieties, e.g., scFv molecules against a tissue antigen.

[0358] In some embodiments, Linker A and Linker B comprise Fc moieties (e.g., self-pairing Fc moieties or Fc moieties that do not, or do not substantially self-pair).

[0359] In Some Embodiments:
[0360] R1 and R3 each comprise an agonistic anti-KIR2DL4 antibody molecule; and
[0361] R2 and R4 independently comprise specific targeting moieties, e.g., scFv molecules against a tissue antigen.

[0362] In some embodiments, Linker A and Linker B comprise Fc moieties (e.g., self-pairing Fc moieties or Fc moieties that do not, or do not substantially self-pair).

[0363] In Some Embodiments:
[0364] R1 and R3 each comprise an agonistic anti-LILRB2 antibody molecule; and
[0365] R2 and R4 independently comprise specific targeting moieties, e.g., scFv molecules against a tissue antigen.

[0366] In some embodiments, Linker A and Linker B comprise Fc moieties (e.g., self-pairing Fc moieties or Fc moieties that do not, or do not substantially self-pair).

[0367] In Some Embodiments:
[0368] R1 and R3 each comprise an agonistic anti-NKG2A antibody molecule; and
[0369] R2 and R4 independently comprise specific targeting moieties, e.g., scFv molecules against a tissue antigen.

[0370] In some embodiments, Linker A and Linker B comprise Fc moieties (e.g., self-pairing Fc moieties or Fc moieties that do not, or do not substantially self-pair).

[0371] In Some Embodiments:
[0372] one of R1 and R3 comprises a first moiety chosen from, and the other comprises a different moiety chosen from: an antagonistic anti-LILRB1 antibody molecule, an agonistic anti-KR2DL4 antibody molecule, and an agonistic anti-NKG2A antibody molecule; and
[0373] R2 and R4 independently comprise specific targeting moieties, e.g., scFv molecules against a tissue antigen.

[0374] In some embodiments, Linker A and Linker B comprise Fc moieties (e.g., self-pairing Fc moieties or Fc moieties that do not, or do not substantially self-pair).

[0375] In Some Embodiments:
[0376] one of R1 and R3 comprises an antagonistic anti-LILRB1 antibody molecule and the other comprises an agonistic anti-KR2DL4 antibody molecule; and
[0377] R2 and R4 independently comprise specific targeting moieties, e.g., scFv molecules against a tissue antigen.

[0378] In some embodiments, Linker A and Linker B comprise Fc moieties (e.g., self-pairing Fc moieties or Fc moieties that do not, or do not substantially self-pair).

[0379] In Some Embodiments:
[0380] one of R1 and R3 comprises an antagonistic anti-LILRB1 antibody molecule and the other comprises an agonistic anti-NKG2A antibody molecule; and
[0381] R2 and R4 independently comprise specific targeting moieties, e.g., scFv molecules against a tissue antigen.

[0382] In some embodiments, Linker A and Linker B comprise Fc moieties (e.g., self-pairing Fc moieties or Fc moieties that do not, or do not substantially self-pair).

[0383] In an Embodiment:
[0384] R1, R2, R3 and R4 each independently comprise: an IL-2 mutein molecule; a specific targeting moiety; or is absent;
[0385] provided that an IL-2 mutein molecule and a specific targeting moiety are present.

[0386] In an embodiment Linker A and Linker B comprise Fc moieties (e.g., self-pairing Fc moieties or Fc moieties that do not, or do not substantially self-pair).

[0387] One of R1, R2, R3 and R4 comprises an IL-2 mutein molecule, one comprises an anti-GITR antibody molecule, e.g., an anti-GITR antibody molecule that inhibits binding of GITRL to GITR, and one comprises a specific targeting moiety;

[0388] In an embodiment Linker A and Linker B comprise Fc moieties (e.g., self-pairing Fc moieties or Fc moieties that do not, or do not substantially self-pair).

[0389] In an Embodiment:
[0390] R1 and R3 each comprise an IL-2 mutein molecule; and
[0391] R2 and R4 independently comprise specific targeting moieties, e.g., scFv molecules against a tissue antigen.

[0392] In an embodiment Linker A and Linker B comprise Fc moieties (e.g., self-pairing Fc moieties or Fc moieties that do not, or do not substantially self-pair).

[0393] In an Embodiment:
[0394] one of R1 and R3 comprises a GARP binding molecule, e.g., an anti-GARP antibody molecule or a GITR binding molecule, e.g., an anti-GITR antibody molecule and the other comprises an IL-2 mutein molecule; and
[0395] R2 and R4 independently comprise specific targeting moieties, e.g., scFv molecules against a tissue antigen.

[0396] In an embodiment Linker A and Linker B comprise Fc moieties (e.g., self-pairing Fc moieties or Fc moieties that do not, or do not substantially self-pair).

[0397] In an Embodiment:
[0398] one of R1 and R3 comprises a GARP binding molecule, e.g., an anti-GARP antibody molecule and the other comprises an IL-2 mutein molecule; and
[0399] R2 and R4 independently comprise specific targeting moieties, e.g., scFv molecules against a tissue antigen.

[0400] In an embodiment Linker A and Linker B comprise Fc moieties (e.g., self-pairing Fc moieties or Fc moieties that do not, or do not substantially self-pair).

[0401] In an Embodiment:
[0402] one of R1 and R3 comprises a GITR binding molecule, e.g., an anti-GITR antibody molecule, and the other comprises an IL-2 mutein molecule; and
[0403] R2 and R4 independently comprise specific targeting moieties, e.g., scFv molecules against a tissue antigen.

[0404] In an embodiment Linker A and Linker B comprise Fc moieties (e.g., self-pairing Fc moieties or Fc moieties that do not, or do not substantially self-pair).

[0405] In Some Embodiments:
[0406] R1, R2, R3 and R4 each independently comprise: an effector binding modulating moiety that activates an inhibitory receptor on a B cell, e.g., an anti-FCRL antibody molecule, e.g., an agonistic anti-FCRL antibody molecule; a specific targeting moiety; or is absent; provided that an effector binding moiety and a specific targeting moiety are present. In some embodiments, Linker A and Linker B comprise Fc moieties (e.g., self-pairing Fc moieties or Fc moieties that do not, or do not substantially self-pair).

[0407] In embodiment the anti-FCRL molecule comprises: an anti-FCRL antibody molecule, e.g., an agonistic anti-FCRL antibody molecule, directed to FCRL1, FCRL2, FCRL3, FCRL4, FCRL5, or FCRL6.

[0408] In Some Embodiments:
[0409] R1 and R3 each comprises an agonistic anti-FCRL antibody molecule; and
[0410] R2 and R4 independently comprise specific targeting moieties, e.g., scFv molecules against a tissue antigen.

[0411] In some embodiments, Linker A and Linker B comprise Fc moieties (e.g., self-pairing Fc moieties or Fc moieties that do not, or do not substantially self-pair).

[0412] In embodiment the anti-FCRL molecule comprises: an anti-FCRL antibody molecule, e.g., an agonistic anti-FCRL antibody molecule directed to FCRL1, FCRL2, FCRL3, FCRL4, FCRL5, or FCRL6.

[0413] In Some Embodiments:
[0414] R1 and R3 independently comprise specific targeting moieties, e.g., antibody molecules against a tissue antigen; and
[0415] R2 and R4 each comprises an anti-FCRL antibody molecule, e.g., an agonistic anti-FCRL antibody molecule, e.g., an scFv molecule.

[0416] In some embodiments, Linker A and Linker B comprise Fc moieties (e.g., self-pairing Fc moieties or Fc moieties that do not, or do not substantially self-pair).

[0417] In embodiment the anti-FCRL molecule comprises: an anti-FCRL antibody molecule, e.g., an agonistic anti-FCRL antibody molecule directed to FCRL1, FCRL2, FCRL3, FCRL4, FCRL5, or FCRL6.

[0418] In Some Embodiments:

[0419] One of R1, R2, R3 and R4 comprises an anti-BCR antibody molecule, e.g., an antagonistic anti-BCR antibody molecule, one comprises an anti FCRL antibody molecule, and one comprises a specific targeting moiety.

[0420] In some embodiments, Linker A and Linker B comprise Fc moieties (e.g., self-pairing Fc moieties or Fc moieties that do not, or do not substantially self-pair).

[0421] In some embodiments, the anti-FCRL molecule comprises: an anti-FCRL antibody molecule, e.g., an agonistic anti-FCRL antibody molecule directed to FCRL1, FCRL2, FCRL3, FCRL4, FCRL5, or FCRL6.

[0422] In Some Embodiments:

[0423] One of R1, R2, R3 and R4 comprises a bispecific antibody molecule comprising an anti-BCR antibody molecule, e.g., an antagonistic anti-BCR antibody molecule, and an anti FCRL antibody molecule, and one comprises a specific targeting moiety;

[0424] In some embodiments, Linker A and Linker B comprise Fc moieties (e.g., self-pairing Fc moieties or Fc moieties that do not, or do not substantially self-pair).

[0425] In embodiment the anti-FCRL molecule comprises: an anti-FCRL antibody molecule, e.g., an agonistic anti-FCRL antibody molecule directed to FCRL1, FCRL2, FCRL3, FCRL4, FCRL5, or FCRL6.

[0426] In Some Embodiments:
[0427] R1, R2, R3 and R4 each independently comprise:
   [0428] i) an effector binding/modulating moiety, e.g., an ICIM binding/modulating moiety, an IIC binding/modulating moiety, ICSM binding/modulating moiety, or an SM binding/modulating moiety, that minimizes or inhibits T cell activity, expansion, or function (a T cell effector binding/modulating moiety);
   [0429] ii) an effector binding/modulating moiety, e.g., an ICIM binding/modulating moiety, an IIC binding/modulating moiety, ICSM binding/modulating moiety, or an SM binding/modulating moiety, that minimizes or inhibits B cell activity, expansion, or function (a B cell effector binding/modulating moiety);
   [0430] iii) a specific targeting moiety; or
   [0431] iv) is absent;
[0432] provided that, a T cell effector binding/modulating moiety, a B cell effector binding/modulating moiety, and a specific targeting moiety are present.

[0433] In some embodiments, Linker A and Linker B comprise Fc moieties (e.g., self-pairing Fc moieties).

[0434] In some embodiments, one of R1, R2, R3, and R4 comprises an agonistic anti-PD-1 antibody and one comprises an HLA-G molecule.

[0435] In some embodiments, one of R1, R2, R3, and R4 comprises an SM binding/modulating moiety, e.g., a CD39 molecule or a CD73 molecule. In some embodiments, one of R1, R2, R3, and R4 comprises an entity that binds, activates, or maintains, a regulatory immune cell, e.g., a Treg cell or a Breg cell, for example, an IL-2 mutein molecule.

[0436] In some embodiments, one of R1, R2, R3, and R4 comprises an agonistic anti-PD-1 antibody, or one comprises an HLA-G molecule, and one comprises an IL-2 mutein molecule. In some embodiments, the PD-1 antibody is replaced with a IL-2 mutein molecule. In some embodiments, one of R1, R2, R3, and R4 comprises an agonistic anti-PD-1 antibody, one comprises an HLA-G molecule, and one comprises CD39 molecule or a CD73 molecule. In some embodiments, the PD-1 antibody is replaced with a IL-2 mutein molecule.

### Linker Regions

[0437] As discussed elsewhere herein specific targeting and effector binding/modulating moieties can be linked by linker regions. Any linker region described herein can be used as a linker. For example, linker Regions A and B can comprise Fc regions. In some embodiments, a therapeutic compound comprises a Linker Region that can self-associate. In some embodiments, a therapeutic compound comprises a Linker Region that has a moiety that minimizes self-association, and typically Linker Region A and Linker Region B are heterodimers. Linkers also include glycine/serine linkers. In some embodiments, the linker can comprise one or more repeats of GGGGS (SEQ ID NO: 23). In some embodiments, the linker comprises 1, 2, 3, 4, or 5 repeats of SEQ ID NO: 23. In some embodiments, the linker comprises GGGGSGGGGSGGGGSGGGGS (SEQ ID NO: 22), or GGGGSGGGGSGGGGS (SEQ ID NO: 30). These linkers can be used in any of the therapeutic compounds or compositions provided herein.

[0438] The linker region can comprise a Fc region that has been modified (e.g. mutated) to produce a heterodimer. In some embodiments, the CH3 domain of the Fc region can be mutated. Examples of such Fc regions can be found in, for example, U.S. Pat. No. 9,574,010, which is hereby incorporated by reference in its entirety. The Fc region as defined herein comprises a CH3 domain or fragment thereof, and may additionally comprise one or more addition constant region domains, or fragments thereof, including hinge, CH1, or CH2. It will be understood that the numbering of the Fc amino acid residues is that of the EU index as in Kabat et al., 1991, NIH Publication 91-3242, National Technical Information Service, Springfield, Va. The “EU index as set forth in Kabat” refers to the EU index numbering of the human IgG1 Kabat antibody. For convenience, Table B of U.S. Pat. No. 9,574,010 provides the amino acids numbered according to the EU index as set forth in Kabat of the CH2 and CH3 domain from human IgG1, which is hereby incorporated by reference. Table 1.1 of U.S. Pat. No. 9,574,010 provides mutations of variant Fc heterodimers that can be used as linker regions. Table 1.1 of U.S. Pat. No. 9,574,010 is hereby incorporated by reference.

[0439] In some embodiments, the Linker Region A comprises a first CH3 domain polypeptide and a the Linker Region B comprises a second CH3 domain polypeptide, the first and second CH3 domain polypeptides independently comprising amino acid modifications as compared to a wild-type CH3 domain polypeptide, wherein the first CH3 domain polypeptide comprises amino acid modifications at positions T350, L351, F405, and Y407, and the second CH3 domain polypeptide comprises amino acid modifications at positions T350, T366, K392 and T394, wherein the amino acid modification at position T350 is T350V, T3501, T350L or T350 M; the amino acid modification at position L351 is L351Y; the amino acid modification at position F405 is F405A, F405V, F405T or F405S; the amino acid modification at position Y407 is Y407V, Y407A or Y4071; the amino acid modification at position T366 is T366L, T366I, T366V, or T366 M, the amino acid modification at position K392 is K392F, K392L or K392 M, and the amino acid modification at position T394 is T394W, and wherein the numbering of amino acid residues is according to the EU index as set forth in Kabat.

[0440] In some embodiments, the amino acid modification at position K392 is K392 M or K392L. In some embodiments, the amino acid modification at position T350 is T350V. In some embodiments, the first CH3 domain polypeptide further comprises one or more amino acid modifications selected from Q347R and one of S400R or S400 E. In some embodiments, the second CH3 domain polypeptide further comprises one or more amino acid modifications selected from L351Y, K360 E, and one of N390R, N390D or N390 E. In some embodiments, the first CH3 domain polypeptide further comprises one or more amino acid modifications selected from Q347R and one of S400R or S400 E, and the second CH3 domain polypeptide further comprises one or more amino acid modifications selected from L351Y, K360 E, and one of N390R, N390D or N390 E. In some embodiments, the amino acid modification at position T350 is T350V. In some embodiments, the amino acid modification at position F405 is F405A. In some embodiments, the amino acid modification at position Y407 is Y407V. In some embodiments, the amino acid modification at position T366 is T366L or T366I. In some embodiments, the amino acid modification at position F405 is F405A, the amino acid modification at position Y407 is and Y407V, the amino acid modification at position T366 is T366L or T366I, and the amino acid modification at position K392 is K392 M or K392L. In some embodiments, the first CH3 domain polypeptide comprises the amino acid modifications T350V, L351Y, S400 E, F405V and Y407V, and the second CH3 domain polypeptide comprises the amino acid modifications T350V, T366L, N390R, K392 M and T394W. In some embodiments, the first CH3 domain polypeptide comprises the amino acid modifications T350V, L351Y, S400 E, F405T and Y407V, and the second CH3 domain polypeptide comprises the amino acid modifications T350V, T366L, N390R, K392 M and T394W. In some embodiments, the first CH3 domain polypeptide comprises the amino acid modifications T350V, L351Y, S400 E, F405S and Y407V, and the second CH3 domain polypeptide comprises the amino acid modifications T350V, T366L, N390R, K392 M and T394W. In some embodiments, the first CH3 domain polypeptide comprises the amino acid modifications T350V, L351Y, S400 E, F405A and Y407V, and the second CH3 domain polypeptide comprises the amino acid modifications T350V, L351Y, T366L, N390R, K392 M and T394W. In some embodiments, the first CH3 domain polypeptide comprises the amino acid modifications Q347R, T350V, L351Y, S400 E, F405A and Y407V, and the second CH3 domain polypeptide comprises the amino acid modifications T350V, K360 E, T366L, N390R, K392 M and T394W. In some embodiments, the first CH3 domain polypeptide comprises the amino acid modifications T350V, L351Y, S400R, F405A and Y407V, and the second CH3 domain polypeptide comprises the amino acid modifications T350V, T366L, N390D, K392 M and T394W. In some embodiments, the first CH3 domain polypeptide comprises the amino acid modifications T350V, L351Y, S400R, F405A and Y407V, and the second CH3 domain polypeptide comprises the amino acid modifications T350V, T366L, N390 E, K392 M and T394W. In some embodiments, the first CH3 domain polypeptide comprises the amino acid modifications T350V, L351Y, S400 E, F405A and Y407V, and the second CH3 domain polypeptide comprises the amino acid modifications T350V, T366L, N390R, K392L and T394W. In some embodiments, the first CH3 domain polypeptide comprises the amino acid modifications T350V, L351Y, S400 E, F405A and Y407V, and the second CH3 domain polypeptide comprises the amino acid modifications T350V, T366L, N390R, K392F and T394W.

[0441] In some embodiments, an isolated heteromultimer comprising a heterodimeric CH3 domain comprising a first CH3 domain polypeptide and a second CH3 domain polypeptide, the first CH3 domain polypeptide comprising amino acid modifications at positions F405 and Y407, and the second CH3 domain polypeptide comprising amino acid modifications at positions T366 and T394, wherein: (i) the first CH3 domain polypeptide further comprises an amino acid modification at position L351, and (ii) the second CH3 domain polypeptide further comprises an amino acid modification at position K392, wherein the amino acid modification at position F405 is F405A, F405T, F405S or F405V; and the amino acid modification at position Y407 is Y407V, Y407A, Y407L or Y4071; the amino acid modification at position T394 is T394W; the amino acid modification at position L351 is L351Y; the amino acid modification at position K392 is K392L, K392 M, K392V or K392F, and the amino acid modification at position T366 is T366I, T366L, T366 M or T366V, wherein the heterodimeric CH3 domain has a melting temperature (Tm) of about 70.degree. C. or greater and a purity greater than about 90%, and wherein the numbering of amino acid residues is according to the EU index as set forth in Kabat.

[0442] In some embodiments, the Linker Region A comprises a first CH3 domain polypeptide and at Linker Region B comprises a second CH3 domain polypeptide, wherein the first CH3 domain polypeptide comprising amino acid modifications at positions F405 and Y407, and the second CH3 domain polypeptide comprising amino acid modifications at positions T366 and T394, wherein: (i) the first CH3 domain polypeptide further comprises an amino acid modification at position L351, and (ii) the second CH3 domain polypeptide further comprises an amino acid modification at position K392, wherein the amino acid modification at position F405 is F405A, F405T, F405S or F405V; and the amino acid modification at position Y407 is Y407V, Y407A, Y407L or Y4071; the amino acid modification at position T394 is T394W; the amino acid modification at position L351 is L351Y; the amino acid modification at position K392 is K392L, K392 M, K392V or K392F, and the amino acid modification at position T366 is T366I, T366L, T366 M or T366V, wherein the heterodimeric CH3 domain has a melting temperature (Tm) of about 70° C. or greater and a purity greater than about 90%, and wherein the numbering of amino acid residues is according to the EU index as set forth in Kabat. In some embodiments, the amino acid modification at position F405 is F405A. In some embodiments, the amino acid modification at position T366 is T366I or T366L. In some embodiments, the amino acid modification at position Y407 is Y407V. In some embodiments, the amino acid modification at position F405 is F405A, the amino acid modification at position Y407 is Y407V, the amino acid modification at position T366 is T366I or T366L, and the amino acid modification at position K392 is K392L or K392 M. In some embodiments, the amino acid modification at position F405 is F405A, the amino acid modification at position Y407 is Y407V, the amino acid modification at position T366 is T366L, and the amino acid modification at position K392 is K392 M. In some embodiments, the amino acid modification at position F405 is F405A, the amino acid modification at position Y407 is Y407V, the amino acid modification at position T366 is T366L, and the amino acid modification at position K392 is K392L. In some embodiments, the amino acid modification at position F405 is F405A, the amino acid modification at position Y407 is Y407V, the amino acid modification at position T366 is T366I, and the amino acid modification at position K392 is K392 M. In some embodiments, the amino acid modification at position F405 is F405A, the amino acid modification at position Y407 is Y407V, the amino acid modification at position T366 is T366I, and the amino acid modification at position K392 is K392L. In some embodiments, the first CH3 domain polypeptide further comprises an amino acid modification at position 5400 selected from S400D and S400 E, and the second CH3 domain polypeptide further comprises the amino acid modification N390R. In some embodiments, the amino acid modification at position F405 is F405A, the amino acid modification at position Y407 is Y405V, the amino acid modification at position 5400 is S400 E, the amino acid modification at position T366 is T366L, and the amino acid modification at position K392 is K392 M.

[0443] In some embodiments, the modified first and second CH3 domains are comprised by an Fc construct based on a type G immunoglobulin (IgG). The IgG can be an IgG1, IgG2, IgG3 or IgG4.

[0444] Other Linker Region A and Linger Region B comprising variant CH3 domains are described in U.S. Pat. Nos. 9,499,634 and 9,562,109, each of which is incorporated by reference in its entirety.

[0445] A Linker Region A and Linker Region B can be complementary fragments of a protein, e.g., a naturally occurring protein such as human serum albumin. In embodiments, one of Linker Region A and Linker Region B comprises a first, e.g., an N terminal fragment of the protein, e.g., hSA, and the other comprises a second, e.g., a C terminal fragment of the protein, e.g., has. In an embodiment the fragments comprise an N terminal and a C terminal fragment. In an embodiment the fragments comprise two internal fragments. Typically the fragments do not overlap. In an embodiment the First and second fragment, together, provide the entire sequence of the original protein, e.g., hSA. The first fragment provides a N terminus and a C terminus for linking, e.g., fusing, to other sequences, e.g., sequences of R1, R2, R3, or R4 (as defined herein).

[0446] The Linker Region A and the Linker Region B can be derived from albumin polypeptide. In some embodiments, the albumin polypeptide is selected from native human serum albumin polypeptide and human alloalbumin polypeptide. The albumin polypeptide can be modified such that the Linker Region A and Linker Region B interact with one another to form heterodimers. Examples of modified albumin polypeptides are described in U.S. Pat. Nos. 9,388,231 and 9,499,605, each of which is hereby incorporated by reference in its entirety. Accordingly, provided herein are multifunctional heteromultimer proteins of the formula R1—Linker Region A—R2 and R3—Linker Region B—R4, wherein the Linker Region A and Linker Region B form a heteromultimer. In some embodiments, the Linker Region A comprises a first polypeptide and the Linker Region B comprises a second polypeptide; wherein each of said first and second polypeptides comprises an amino acid sequence comprising a segment of an albumin polypeptide selected from native human serum albumin polypeptide and human alloalbumin polypeptide; wherein said first and second polypeptides are obtained by segmentation of said albumin polypeptide at a segmentation site, such that the segmentation results in a deletion of zero to 3 amino acid residues at the segmentation site; wherein said first polypeptide comprises at least one mutation selected from A194C, L198C, W214C, A217C, L331C and A335C, and said second polypeptide comprises at least one mutation selected from L331C, A335C, V343C, L346C, A350C, V455C, and N458C; and wherein said first and second polypeptides self-assemble to form a quasi-native structure of the monomeric form of the albumin polypeptide.

[0447] In some embodiments, the segmentation site resides on a loop of the albumin polypeptide that has a high solvent accessible surface area (SASA) and limited contact with the rest of the albumin structure, b) the segmentation results in a complementary interface between the transporter polypeptides. These segmentation sites are described, for example, in U.S. Pat. No. 9,388,231, which is hereby incorporated by reference in its entirety.

[0448] In some embodiments, the first polypeptide comprises residues 1-337 or residues 1-293 of the albumin polypeptide with one or more of the mutations described herein. In some embodiments, the second polypeptide comprises residues of 342-585 or 304-585 of the albumin polypeptide with one or more of the mutations described herein. In some embodiments, the first polypeptide comprises residues 1-339, 1-300, 1-364, 1-441, 1-83, 1-171, 1-281, 1-293, 1-114, 1-337, or 1-336 of the albumin protein. In some embodiments, the second polypeptide comprises residues 301-585, 365-585, 442-585, 85-585, 172-585, 282-585, or 115-585, 304-585, 340-585, or 342-585 of the albumin protein.

[0449] In some embodiments, the first and second polypeptide comprise the residues of the albumin protein as shown in the table below. The sequence of the albumin protein is described below.

| First Polypeptide Residues | Second Polypeptide Residues |
|---|---|
| 1-300 | 301-585 |
| 1-364 | 365-585 |
| 1-441 | 442-585 |
| 1-83 | 85-585 |
| 1-171 | 172-585 |
| 1-281 | 282-585 |
| 1-114 | 115-585 |
| 1-339 | 340-585 |
| 1-337 | 342-585 |
| 1-293 | 304-585 |
| 1-336 | 342-585 |

[0450] In some embodiments, the first and second polypeptides comprise a linker that can form a covalent bond with one another, such as a disulfide bond. A non-limiting example of the linker is a peptide linker. In some embodiments, the peptide linker comprises GGGGS (SEQ ID NO: 23). The linker can be fused to the C-terminus of the first polypeptide and the N-terminus of the second polypeptide. The linker can also be used to attach the moieties described herein without abrogating the ability of the linkers to form a disulfide bond. In some embodiments, the first and second polypeptides do not comprise a linker that can form a covalent bond. In some embodiments, the first and second polypeptides have the following substitutions.

| First Polypeptide Substitution | Second Polypeptide Substitution |
|---|---|
| A217C | V343C |
| L331C | A350C |
| A217C | L346C |
| W214C | V343C |
| A335C | L346C |
| L198C | V455C |
| A217C | A335C |
| A217C | L331C |
| L198C | N458C |
| A194C | V455C |

[0451] The sequence of the albumin polypeptide can be The sequence of human albumin is as shown, in the post-protein form with the N-terminal signaling residues removed

(MKWVTFISLLFLFSSAYSRGVFRR (SEQ ID NO: 1437))
(human albumin, SEQ ID NO: 42)
[sequence omitted]

[0452] In some embodiments, the Linker Region A and the Linker Region B form a heterodimer as described herein.

[0453] In some embodiments, the polypeptide comprises at the N-terminus an antibody comprised of F(ab′)2 on an IgG1 Fc backbone fused with scFvs on the C-terminus of the IgG Fc backbone. In some embodiments, the IgG Fc backbone is a IgG1 Fc backbone. In some embodiments, the IgG1 backbone is replaced with a IgG4 backbone, IgG2 backbone, or other similar IgG backbone. The IgG backbones described in this paragraph can be used throughout this application where a Fc region is referred to as part of the therapeutic compound. Thus, in some embodiments, the antibody comprised of F(ab′)2 on an IgG1 Fc backbone can be an anti-MAdCAM antibody or an anti-PD-1 antibody on an IgG1 Fc or any other targeting moiety or effector binding/modulating moiety provided herein. In some embodiments, the scFv segments fused to the C-terminus could be an anti-PD-1 antibody, if the N-terminus region is an anti-MAdCAM antibody, or anti-MAdCAM antibody, if the N-terminus region is an anti-PD-1 antibody. In this non-limiting example, the N-terminus can be the targeting moiety, such as any one of the ones provided for herein, and the C-terminus can be the effector binding/modulating moiety, such as any of the ones provided for herein. Alternatively, in some embodiments, the N-terminus can be the effector binding/modulating moiety, such as any one of the ones provided for herein, and the C-terminus can be the targeting moiety, such as any of the ones provided for herein.

[0454] In some embodiments, the N-terminus can be the targeting moiety, such as any one of the ones provided for herein, and the C-terminus can be the effector binding/modulating moiety, such as any of the ones provided for herein.

[0455] In some embodiments, the therapeutic compound comprises two polypeptides that homodimerize. In some embodiments, the N-terminus of the polypeptide comprises an effector binding/modulating moiety that is fused to a human IgG1 Fc domain (e.g. CH2 and/or CH3 domains). In some embodiments, the C-terminus of the Fc domain is another linker that is fused to the targeting moiety. Thus, in some embodiments, the molecule could be represented using the formula of R1-Linker A-Fc Region-Linker B—R2, wherein R1 can be an effector binding/modulating moiety, R2 is a targeting moiety, Linker A and Linker B are independently linkers as provided for herein. In some embodiments, Linker 1 and Linker 2 are different.

[0456] In some embodiments, the molecule could be represented using the formula of R1-Linker A-Fc Region-Linker B—R2, wherein R1 can be a targeting moiety, R2 is an effector binding/modulating moiety, Linker A and Linker B are independently linkers as provided for herein. In some embodiments, Linker A and Linker B are different. The linkers can be chosen from the non-limiting examples provided for herein. In some embodiments, R1 and R2 are independently selected from F(ab′)2 and scFv antibody domains. In some embodiments, R1 and R2 are different antibody domains. In some embodiments, the scFv is in the VL-VH domain orientation.

[0457] In some embodiments, the therapeutic compound is a bispecific antibody. In some embodiments, the bispecific antibodies are comprised of four polypeptide chains comprising the following:
[0458] Chain 1: nt-VH1-CH1-CH2-CH3-Linker A-scFv[VL2-Linker B—VH2]-ct
[0459] Chain 2: nt-VH1-CH1-CH2-CH3-Linker A-scFv[VL2-Linker B—VH2]-ct
[0460] Chain 3: nt-VL1-CL-ct
[0461] Chain 4: nt-VL1-CL-ct,
[0462] wherein chains 1 and 2 are identical to each other, and chains 3 and 4 are identical to each other,
[0463] wherein chain 1 forms a homodimer with chain 2; and chain 3 and 4 associate with chain 1 and chain 2. That is, when each light chain associates with each heavy chain, VL1 associates with VH1 and CL associates with CH1 to form two functional Fab units. Without being bound to any particular theory, each scFv unit is intrinsically functional since VL2 and VH2 are covalently linked in tandem with a linker as provided herein, e.g., GGGGS (SEQ ID NO: 23), GGGGSGGGGSGGGGSGGGGS (SEQ ID NO: 22), or GGGGSGGGGSGGGGS (SEQ ID NO: The sequences of Linker A and Linker B, which are independent of one another can be the same or different and as otherwise described throughout the present application. Thus, in some embodiments, Linker A comprises GGGGS (SEQ ID NO: 23), or two repeats thereof, GGGGSGGGGSGGGGS (SEQ ID NO: 30), or GGGGSGGGGSGGGGSGGGGS (SEQ ID NO: 22). In some embodiments, Linker B comprises GGGGS (SEQ ID NO: 23), or two repeats thereof, GGGGSGGGGSGGGGS (SEQ ID NO: 30), or GGGGSGGGGSGGGGSGGGGS (SEQ ID NO: 22). The scFv may be arranged in the NT-VH2-VL2-CT or NT-VL2-VH2-CT orientation. NT or nt stands for N-terminus and CT or ct stands for C-terminus of the protein. CH1, CH2, and CH3 are the domains from the IgG Fc region, and CL stands for Constant Light chain, which can be either kappa or lambda family light chains. The other definitions stand for the way they are normally used in the art.

[0464] In some embodiments, the VH1 and VL1 domains are derived from the effector molecule and the VH2 and VL2 domains are derived from the targeting moiety. In some embodiments the VH1 and VL1 domains are derived from a targeting moiety and the VH2 and VL2 domains are derived from an effector binding/modulating moiety.

[0465] In some embodiments, the VH1 and VL1 domains are derived from an anti-PD-1 antibody, and the VH2 and VL2 domains are derived from an anti-MAdCAM antibody. In some embodiments the VH1 and VL1 domains are derived from an anti-MAdCAM antibody and the VH2 and VL2 domains are derived from an anti-PD-1 antibody.

[0466] In some embodiments, Linker A comprises 1, 2, 3, 4, or 5 GGGGS (SEQ ID NO: 23) repeats (repeats disclosed as SEQ ID NO: 1549). In some embodiments, Linker B comprises 1, 2, 3, 4, or 5 GGGGS (SEQ ID NO: 23) repeats (repeats disclosed as SEQ ID NO: 1549). For the avoidance of doubt, the sequences of Linker A and Linker B, which are used throughout this application, are independent of one another. Therefore, in some embodiments, Linker A and Linker B can be the same or different. In some embodiments, Linker A comprises GGGGS (SEQ ID NO: 23), or two repeats thereof, GGGGSGGGGSGGGGS (SEQ ID NO: 30), or GGGGSGGGGSGGGGSGGGGS (SEQ ID NO: 22). In some embodiments, Linker B comprises GGGGS (SEQ ID NO: 23), or two repeats thereof, GGGGSGGGGSGGGGS (SEQ ID NO: 30), or GGGGSGGGGSGGGGSGGGGS (SEQ ID NO: 22).

[0467] In some embodiments, the therapeutic compound comprises a light chain and a heavy chain. In some embodiments, the light and heavy chain begin at the N-terminus with the VH domain of a targeting moiety followed by the CH1 domain of a human IgG1, which is fused to a Fc region (e.g. CH2-CH3) of human IgG1. In some embodiments, at the c-terminus of the Fc region is fused to a linker as provided herein, such as but not limited to, GGGGS (SEQ ID NO: 23), or two or three repeats thereof, or GGGGSGGGGSGGGGS (SEQ ID NO: 30). The linker can then be fused to an effector binding/modulating moiety, such as any one of the effector moieties provided for herein. The polypeptides can homodimerize because through the heavy chain homodimerization, which results in a therapeutic compound having two effector moieties, such as two anti-PD-1 antibodies. In this orientation, the targeting moiety is an IgG format, there are two Fab arms that each recognize binding partner of the targeting moiety, for example, MAdCAM being bound by the anti-MAdCAM targeting moiety.

[0468] In some embodiments, the therapeutic or polypeptide comprises a formula of: An antibody (targeting moiety) with a variable heavy chain and a variable light chain, in an IgG isotype, for example, with an effector molecule, such as an IL-2 mutein. In some embodiments, the IL-2 mutein is fused at the c-terminus of the variable heavy chain. This can be represented by the formula of VL and VH-IgGConstantDomain-L1-E, wherein L1 is a linker, such as a glycine/serine linker as provided herein, E is an effector molecule, such as an IL-2 mutein and VL and VH are the variable light and heavy chains. The VL domain can be a kappa domain. In some embodiments, the IgG Constant domain comprises the sequence of:

(SEQ ID NO: 44)
ASTKGPSVFPLAPSSKSTSGGTAALGCLVKDYFPEPVTVSWNSGALTSG
VHTFPAVLQSSGLYSLSSVVTVPSSSLGTQTYICNVNHKPSNTKVDKKV
EPKSCDKTHTCPPCPAPEAAGAPSVFLFPPKPKDTLMISRTPEVTCVVV
DVSHEDPEVKFNWYVDGVEVHNAKTKPREEQYNSTYRVVSVLTVLHQDW
LNGKEYKCKVSNKALPAPIEKTISKAKGQPREPQVYTLPPSREEMTKNQ
VSLTCLVKGFYPSDIAVEWESNGQPENNYKTTPPVLDSDGSFFLYSKLT
VDKSRWQQGNVFSCSVMHEALHNHYTQKSLSLSPG

[0469] In some embodiments, the linker comprises GGGGS (SEQ ID NO: 23). In some embodiments, the IL-2 mutein comprises the IL-2 muteins provided herein, such as one of SEQ ID NOs: 31-41, which can also have a Fc molecule appended to the N- or C-terminus of the IL-2 mutein. The Fc domain can comprise SEQ ID NO: 21 or 43. In some embodiments, the IL-2 mutein comprises one of SEQ ID NO: 47-60. In some embodiments, the IL-2 mutein comprises SEQ ID NO: 41 or SEQ ID NO: 56. In some embodiments, the IL-2 mutein comprises SEQ ID NO: 40 or SEQ ID NO: 55.

[0470] In some embodiments, the targeting moiety is a MAdCAM antibody. In some embodiments, the MAdCAM antibody is selected from the following table:

TABLE 6

| Clone | | | | | | | |
|---|---|---|---|---|---|---|---|
| ID | HCDR1 | HCDR2 | HCDR3 | LCDR1 | LCDR2 | LCDR3 | ScFv |
| 1. | FTFS | AVIS | CTTS | QASQDI | AASSLQS | CQQGYSTPLTF | EVQLLESGGGLVQPGGSLRLSCAA |
| | SYGM | DDGS | KYYY | SKSLN | (SEQ ID | (SEQ ID NO: | SGFTFSSYGMHWVRQAPGKGLEWV |
| | H | DKYY | YYGM | (SEQ | NO: 65) | 66) | AVISDDGSDKYYADSVKGRFTISR |
| | (SEQ | A | DVW | ID NO: | | | DNSKNTLYLQMNSLRAEDTAVYYC |
| | ID | (SEQ | (SEQ | 64) | | | TTSKYYYYYGMDVWGQGTTVTVSS |
| | NO: | ID | ID | | | | GGGGSGGGGSGGGGSGGGGSDIQM |
| | 61) | NO: | NO: | | | | TQSPSSLSASVGDRVTITCQASQD |
| | | 62) | 63) | | | | ISKSLNWYQQKPGKAPKLLIYAAS |
| | | | | | | | SLQSGVPSRFSGSGSGTDFTLTIS |
| | | | | | | | SLQPEDFATYYCQQGYSTPLTFGG |
| | | | | | | | GTKVEIK (SEQ ID NO: 67) |
| 2. | YPFI | GIIN | CARE | RASQSI | GASTLES | CQQTWGPPFTF | QVQLVQSGAEVKKPGASVKVSCKA |
| | GYYL | PSGG | GRLS | SSYLA | (SEQ ID | (SEQ ID NO: | SGYPFIGYYLHWVRQAPGQGLEWM |
| | H | STSY | YGMD | (SEQ | NO: 72) | 73) | GIINPSGGSTSYAQKFQGRVTMTR |
| | (SEQ | A | AW | ID NO: | | | DTSTSTVYMELSSLRSEDTAVYYC |
| | ID | (SEQ | (SEQ | 71) | | | AREGRLSYGMDAWGQGTLVTVSSG |
| | NO: | ID | ID | | | | GGGSGGGGSGGGGSGGGGSDIQMT |
| | 68) | NO: | NO: | | | | QSPSSLSASVGDRVTITCRASQSI |
| | | 69) | 70) | | | | SSYLAWYQQKPGKAPKLLIYGAST |
| | | | | | | | LESGVPSRFSGSGSGTDFTLTISS |
| | | | | | | | LQPEDFATYYCQQTWGPPFTFGQG |
| | | | | | | | TKLEIK (SEQ ID NO: 74) |
| 3. | YPFI | GIIN | CARE | RASQSI | GASTLES | CQQTWGPPFTF | QVQLVQSGAEVKKPGASVKVSCKA |
| | GQYL | PSGG | GRLS | SSYLA | (SEQ ID | (SEQ ID NO: | SGYPFIGQYLHWVRQAPGQGLEWM |
| | H | STSY | YGMD | (SEQ | NO: 72) | 73) | GIINPSGGSTSYAQKFQGRVTMTR |
| | (SEQ | A | AW | ID NO: | | | DTSTSTVYMELSSLRSEDTAVYYC |
| | ID | (SEQ | (SEQ | 71) | | | AREGRLSYGMDAWGQGTLVTVSSG |
| | NO: | ID | ID | | | | GGGSGGGGSGGGGSGGGGSDIQMT |
| | 75) | NO: | NO: | | | | QSPSSLSASVGDRVTITCRASQSI |
| | | 69) | 70) | | | | SSYLAWYQQKPGKAPKLLIYGAST |
| | | | | | | | LESGVPSRFSGSGSGTDFTLTISS |
| | | | | | | | LQPEDFATYYCQQTWGPPFTFGQG |
| | | | | | | | TKLEIK (SEQ ID NO: 76) |
| 4. | GTFS | GSIN | CAKD | QASQDI | AASSLQS | CQQSYSSVITF | QVQLVQSGAEVKKPGASVKVSCKA |
| | SYAI | PSGD | KAQW | SNSLN | (SEQ ID | (SEQ ID NO: | SGGTFSSYAISWVRQAPGQGLEWM |
| | S | TTSY | LVGY | (SEQ | NO: 65) | 81) | GSINPSGDTTSYAQKFQGRVTMTR |
| | (SEQ | A | FDYW | ID NO: | | | DTSTSTVYMELSSLRSEDTAVYYC |
| | ID | (SEQ | (SEQ | 80) | | | AKDKAQWLVGYFDYWGQGTLVTVS |
| | NO: | ID | ID | | | | SGGGGSGGGGSGGGGSGGGGSDIQ |
| | 77) | NO: | NO: | | | | MTQSPSSLSASVGDRVTITCQASQ |
| | | 78) | 79) | | | | DISNSLNWYQQKPGKAPKLLIYAA |
| | | | | | | | SSLQSGVPSRFSGSGSGTDFTLTI |
| | | | | | | | SSLQPEDFATYYCQQSYSSVITFG |
| | | | | | | | QGTKVEIK (SEQ ID NO: 82) |
| 5. | FTFS | SSIS | CARE | RASQGI | GASSLQS | CQQANSFPFTE | EVQLLESGGGLVQPGGSLRLSCAA |
| | SYWM | PGGS | VQLS | SNSLA | (SEQ ID | (SEQ ID NO: | SGFTFSSYWMHWVRQAPGKGLEWV |
| | H | NIDY | HYDY | (SEQ | NO: 87) | 88) | SSISPGGSNIDYADSVKGRFTISR |
| | (SEQ | A | W | ID NO: | | | DNSKNTLYLQMNSLRAEDTAVYYC |
| | ID | (SEQ | (SEQ | 86) | | | AREVQLSHYDYWGQGTLVTVSSGG |
| | NO: | ID | ID | | | | GGSGGGGSGGGGSGGGGSDIQMTQ |
| | 83) | NO: | NO: | | | | SPSSLSASVGDRVTITCRASQGIS |
| | | 84) | 85) | | | | NSLAWYQQKPGKAPKLLIYGASSL |
| | | | | | | | QSGVPSRFSGSGSGTDFTLTISSL |
| | | | | | | | QPEDFATYYCQQANSFPFTFGQGT |
| | | | | | | | KVEIK (SEQ ID NO: 89) |
| 6. | FTEN | SRIN | CARE | RASQII | GASSLQS | CQQSYRLPFTF | EVQLLESGGGLVQPGGSLRLSCAA |
| | NYAF | SYGT | GPVA | GTNLA | (SEQ ID | (SEQ ID NO: | SGFTFNNYAFHWVRQAPGKGLEWV |
| | H | STTY | GYWY | (SEQ | NO: 87) | 94) | SRINSYGTSTTYADSVKGRFTISR |
| | (SEQ | A | FDLW | ID NO: | | | DNSKNTLYLQMNSLRAEDTAVYYC |
| | ID | (SEQ | (SEQ | 93) | | | AREGPVAGYWYFDLWGQGTLVTVS |
| | NO: | ID | ID | | | | SGGGGSGGGGSGGGGSGGGGSDIQ |
| | 90) | NO: | NO: | | | | MTQSPSSLSASVGDRVTITCRASQ |
| | | 91) | 92) | | | | IIGTNLAWYQQKPGKAPKLLIYGA |
| | | | | | | | SSLQSGVPSRFSGSGSGTDFTLTI |
| | | | | | | | SSLQPEDFATYYCQQSYRLPFTFG |
| | | | | | | | QGTKVEIK (SEQ ID NO: 95) |
| 7. | YTFT | GIIN | CAKD | RASQNI | AASSLQS | CQQSYTTPYTF | QVQLVQSGAEVKKPGASVKVSCKA |
| | GYHI | PSGG | WSSW | SSSLN | (SEQ ID | (SEQ ID NO: | SGYTFTGYHIHWVRQAPGQGLEWM |
| | H | STIY | YLGP | (SEQ | NO: 65) | 100) | GIINPSGGSTIYAQKFQGRVTMTR |
| | (SEQ | A | FDYW | ID NO: | | | DTSTSTVYMELSSLRSEDTAVYYC |
| | ID | (SEQ | (SEQ | 99) | | | AKDWSSWYLGPFDYWGQGTLVTVS |
| | NO: | ID | ID | | | | SGGGGSGGGGSGGGGSGGGGSDIQ |
| | 96) | NO: | NO: | | | | MTQSPSSLSASVGDRVTITCRASQ |
| | | 97) | 98) | | | | NISSSLNWYQQKPGKAPKLLIYAA |
| | | | | | | | SSLQSGVPSRFSGSGSGTDFTLTI |
| | | | | | | | SSLQPEDFATYYCQQSYTTPYTFG |
| | | | | | | | QGTKVEIK (SEQ ID NO: |
| | | | | | | | 101) |
| 8. | FMFG | SAIS | CAKD | RASQGI | DASSLES | CQQTHSFPSTF | EVQLLESGGGLVQPGGSLRLSCAA |
| | DYAM | GSGG | LVVA | SNNLN | (SEQ ID | (SEQ ID NO: | SGFMFGDYAMHWVRQAPGKGLEWV |
| | H | STYY | GIWY | (SEQ | NO: | 107) | SAISGSGGSTYYADSVKGRFTISR |
| | (SEQ | A | FDLW | ID NO: | 106) | | DNSKNTLYLQMNSLRAEDTAVYYC |
| | ID | (SEQ | (SEQ | 105) | | | AKDLVVAGIWYFDLWGRGTLVTVS |
| | NO: | ID | ID | | | | SGGGGSGGGGSGGGGSGGGGSDIQ |
| | 102) | NO: | NO: | | | | MTQSPSSLSASVGDRVTITCRASQ |
| | | 103) | 104) | | | | GISNNLNWYQQKPGKAPKLLIYDA |
| | | | | | | | SSLESGVPSRFSGSGSGTDFTLTI |
| | | | | | | | SSLQPEDFATYYCQQTHSFPSTFG |
| | | | | | | | QGTKLEIK (SEQ ID NO: |
| | | | | | | | 108) |
| 9. | FTFS | SVIG | CAAD | RASQGI | AASTLQS | CQQSYSTPWTF | EVQLLESGGGLVQPGGSLRLSCAA |
| | DYYM | ESGG | PVSR | SSSLA | (SEQ ID | (SEQ ID NO: | SGFTFSDYYMNWVRQAPGKGLEWV |
| | N | STYY | WPKH | (SEQ | NO: | 114) | SVIGESGGSTYYADSVKGRFTISR |
| | (SEQ | A | GGGD | ID NO: | 113) | | DNSKNTLYLQMNSLRAEDTAVYYC |
| | ID | (SEQ | YW | 112) | | | AADPVSRWPKHGGGDYWGQGTLVT |
| | NO: | ID | (SEQ | | | | VSSGGGGSGGGGSGGGGSGGGGSD |
| | 109) | NO: | ID | | | | IQMTQSPSSLSASVGDRVTITCRA |
| | | 110) | NO: | | | | SQGISSSLAWYQQKPGKAPKLLIY |
| | | | 111) | | | | AASTLQSGVPSRFSGSGSGTDFTL |
| | | | | | | | TISSLQPEDFATYYCQQSYSTPWT |
| | | | | | | | FGQGTKVEIK (SEQ ID NO: |
| | | | | | | | 115) |
| 10. | YTLT | GWIN | CAKG | RASDNI | AASSLQS | CQQGYSTPPTF | QVQLVQSGAEVKKPGASVKVSCKA |
| | TWYM | PNRG | DLWG | GSWLA | (SEQ ID | (SEQ ID NO: | SGYTLTTWYMYWVRQAPGQGLEWM |
| | Y | ATNY | AMDV | (SEQ | NO: 65) | 120) | GWINPNRGATNYAQKFQGRVTMTR |
| | (SEQ | A | W | ID NO: | | | DTSTSTVYMELSSLRSEDTAVYYC |
| | ID | (SEQ | (SEQ | 119) | | | AKGDLWGAMDVWGQGTLVTVSSGG |
| | NO: | ID | ID | | | | GGSGGGGSGGGGSGGGGSDIQMTQ |
| | 116) | NO: | NO: | | | | SPSSLSASVGDRVTITCRASDNIG |
| | | 117) | 118) | | | | SWLAWYQQKPGKAPKLLIYAASSL |
| | | | | | | | QSGVPSRFSGSGSGTDFTLTISSL |
| | | | | | | | QPEDFATYYCQQGYSTPPTFGQGT |
| | | | | | | | KVEIK (SEQ ID NO: 121) |
| 11. | YTFT | GGFD | CARH | RASESI | AASTLQS | CQQSYSVPFTF | QVQLVQSGAEVKKPGASVKVSCKA |
| | TYYM | PEDG | AVAG | SNWLA | (SEQ ID | (SEQ ID NO: | SGYTFTTYYMHWVRQAPGQGLEWM |
| | H | ETIY | AVGA | (SEQ | NO: | 126) | GGFDPEDGETIYAQKFQGRVTMTR |
| | (SEQ | A | GYYY | ID NO: | 113) | | DTSTSTVYMELSSLRSEDTAVYYC |
| | ID | (SEQ | YGMD | 125) | | | ARHAVAGAVGAGYYYYGMDVWGQG |
| | NO: | ID | VW | | | | TMVTVSSGGGGSGGGGSGGGGSGG |
| | 122) | NO: | (SEQ | | | | GGSDIQMTQSPSSLSASVGDRVTI |
| | | 123) | ID | | | | TCRASESISNWLAWYQQKPGKAPK |
| | | | NO: | | | | LLIYAASTLQSGVPSRFSGSGSGT |
| | | | 124) | | | | DFTLTISSLQPEDFATYYCQQSYS |
| | | | | | | | VPFTFGPGTKVDIK (SEQ ID |
| | | | | | | | NO: 127) |
| 12. | YTFT | GWIG | CARD | RSSQSL | SSSNRAP | CMQALHIPLTF | QVQLVQSGAEVKKPGASVKVSCKA |
| | GYYM | PNSG | LDHN | LHSNGY | (SEQ ID | (SEQ ID NO: | SGYTFTGYYMHWVRQAPGQGLEWM |
| | H | DTNY | WYFD | NYLD | NO: | 133) | GWIGPNSGDTNYAQKFQGRVTMTR |
| | (SEQ | A | LW | (SEQ | 132) | | DTSTSTVYMELSSLRSEDTAVYYC |
| | ID | (SEQ | (SEQ | ID NO: | | | ARDLDHNWYFDLWGRGTLVTVSSG |
| | NO: | ID | ID | 131) | | | GGGSGGGGSGGGGSGGGGSDIVMT |
| | 128) | NO: | NO: | | | | QSPLSLPVTPGEPASISCRSSQSL |
| | | 129) | 130) | | | | LHSNGYNYLDWYLQKPGQSPQLLI |
| | | | | | | | YSSSNRAPGVPDRFSGSGSGTDFT |
| | | | | | | | LKISRVEAEDVGVYYCMQALHIPL |
| | | | | | | | TFGGGTKVEIK (SEQ ID NO: |
| | | | | | | | 134) |
| 13. | FTFD | SYID | CAKD | QASQDI | KASTLES | CQQSYSTPITF | EVQLLESGGGLVQPGGSLRLSCAA |
| | DYAM | ASGT | QAAA | SNYLN | (SEQ ID | (SEQ ID NO: | SGFTFDDYAMHWVRQAPGKGLEWV |
| | H | TIYY | GYWY | (SEQ | NO: | 140) | SYIDASGTTIYYADSVKGRFTISR |
| | (SEQ | A | FDLW | ID NO: | 139) | | DNSKNTLYLQMNSLRAEDTAVYYC |
| | ID | (SEQ | (SEQ | 138) | | | AKDQAAAGYWYFDLWGRGTLVTVS |
| | NO: | ID | ID | | | | SGGGGSGGGGSGGGGSGGGGSDIQ |
| | 135) | NO: | NO: | | | | MTQSPSSLSASVGDRVTITCQASQ |
| | | 136) | 137) | | | | DISNYLNWYQQKPGKAPKLLIYKA |
| | | | | | | | STLESGVPSRFSGSGSGTDFTLTI |
| | | | | | | | SSLQPEDFATYYCQQSYSTPITFG |
| | | | | | | | QGTRLEIK (SEQ ID NO: |
| | | | | | | | 141) |
| 14. | YTFT | GGIV | CAKD | RSSQSL | SAYNRAS | CMQALQTPLTF | QVQLVQSGAEVKKPGSSVKVSCKA |
| | DYHI | PRSG | ESSG | LHSNGY | (SEQ ID | (SEQ ID NO: | SGYTFTDYHIHWVRQAPGQGLEWM |
| | H | STTY | WYYF | NYLD | NO: | 146) | GGIVPRSGSTTYAQKFQGRVTITA |
| | (SEQ | A | DYW | (SEQ | | | DESTSTAYMELSSLRSEDTAVYYC |
| | ID | (SEQ | (SEQ | ID NO: | 145) | | AKDESSGWYYFDYWGQGTLVTVSS |
| | NO: | ID | ID | 131) | | | GGGGSGGGGSGGGGSGGGGSDIVM |
| | 142) | NO: | NO: | | | | TQSPLSLPVTPGEPASISCRSSQS |
| | | 143) | 144) | | | | LLHSNGYNYLDWYLQKPGQSPQLL |
| | | | | | | | IYSAYNRASGVPDRFSGSGSGTDF |
| | | | | | | | TLKISRVEAEDVGVYYCMQALQTP |
| | | | | | | | LTFGQGTKVEIK (SEQ ID NO: |
| | | | | | | | 147) |
| 15. | YTFT | GGII | CAKG | QANQDI | RASKLEA | CQQSSEIPYSF | QVQLVQSGAEVKKPGSSVKVSCKA |
| | NYYM | PIVD | RYTV | SNYLN | (SEQ ID | (SEQ ID NO: | SGYTFTNYYMHWVRQAPGQGLEWM |
| | H | RVKY | NYYY | (SEQ | NO: | 153) | GGIIPIVDRVKYAQKFQGRVTITA |
| | (SEQ | A | GMDV | ID NO: | 152) | | DESTSTAYMELSSLRSEDTAVYYC |
| | ID | (SEQ | W | 151) | | | AKGRYTVNYYYGMDVWGQGTTVTV |
| | NO: | ID | (SEQ | | | | SSGGGGSGGGGSGGGGSGGGGSDI |
| | 148) | NO: | ID | | | | QMTQSPSSLSASVGDRVTITCQAN |
| | | 149) | NO: | | | | QDISNYLNWYQQKPGKAPKLLIYR |
| | | | 150) | | | | ASKLEAGVPSRFSGSGSGTDFTLT |
| | | | | | | | ISSLQPEDFATYYCQQSSEIPYSF |
| | | | | | | | GQGTKLEIK (SEQ ID NO: |
| | | | | | | | 154) |
| 16. | FTFE | SYLN | CAKD | RASQSI | DASNLET | CQQSYTIPITF | EVQLLESGGGLVQPGGSLRLSCAA |
| | DYAM | SDGG | YCTN | STYLN | (SEQ ID | (SEQ ID NO: | SGFTFEDYAMHWVRQAPGKGLEWV |
| | H | STSY | GVCA | (SEQ | NO: | 160) | SYLNSDGGSTSYADSVKGRFTISR |
| | (SEQ | A | FDYW | ID NO: | 159) | | DNSKNTLYLQMNSLRAEDTAVYYC |
| | ID | (SEQ | (SEQ | 158) | | | AKDYCTNGVCAFDYWGQGTLVTVS |
| | NO: | ID | ID | | | | SGGGGSGGGGSGGGGSGGGGSDIQ |
| | 155) | NO: | NO: | | | | MTQSPSSLSASVGDRVTITCRASQ |
| | | 156) | 157) | | | | SISTYLNWYQQKPGKAPKLLIYDA |
| | | | | | | | SNLETGVPSRFSGSGSGTDFTLTI |
| | | | | | | | SSLQPEDFATYYCQQSYTIPITFG |
| | | | | | | | QGTRLEIK (SEQ ID NO: |
| | | | | | | | 161) |
| 17. | FTFS | SAIS | CVSD | RASQSI | AASRLEG | CQQANSFPLTF | EVQLLESGGGLVQPGGSLRLSCAA |
| | DSAM | GSGS | IAVA | STFLN | (SEQ ID | (SEQ ID NO: | SGFTFSDSAMHWVRQAPGKGLEWV |
| | H | TIYY | GHWY | (SEQ | NO: | 167) | SAISGSGSTIYYADSVKGRFTISR |
| | (SEQ | A | FDLW | ID NO: | 166) | | DNSKNTLYLQMNSLRAEDTAVYYC |
| | ID | (SEQ | (SEQ | 165) | | | VSDIAVAGHWYFDLWGRGTLVTVS |
| | NO: | ID | ID | | | | SGGGGSGGGGSGGGGSGGGGSDIQ |
| | 162) | NO: | NO: | | | | MTQSPSSLSASVGDRVTITCRASQ |
| | | 163) | 164) | | | | SISTFLNWYQQKPGKAPKLLIYAA |
| | | | | | | | SRLEGGVPSRFSGSGSGTDFTLTI |
| | | | | | | | SSLQPEDFATYYCQQANSFPLTFG |
| | | | | | | | PGTKVDIK (SEQ ID NO: |
| | | | | | | | 168) |
| 18. | FTES | SYIS | CARA | RASQSI | AASSLQS | CQQSYSTPLTF | EVQLVESGGGLVKPGGSLRLSCAA |
| | SYWM | GDSG | NSSG | SSYLN | (SEQ ID | (SEQ ID NO: | SGFTFSSYWMSWVRQAPGKGLEWV |
| | S | YTNY | WYDW | (SEQ | NO: 65) | 173) | SYISGDSGYTNYAAPVKGRFTISR |
| | (SEQ | A | YFDL | ID NO: | | | DDSKNTLYLQMNSLKTEDTAVYYC |
| | ID | (SEQ | W | 172) | | | ARANSSGWYDWYFDLWGRGTLVTV |
| | NO: | ID | (SEQ | | | | SSGGGGSGGGGSGGGGSGGGGSDI |
| | 169) | NO: | ID | | | | QMTQSPSSLSASVGDRVTITCRAS |
| | | 170) | NO: | | | | QSISSYLNWYQQKPGKAPKLLIYA |
| | | | 171) | | | | ASSLQSGVPSRFSGSGSGTDFTLT |
| | | | | | | | ISSLQPEDFATYYCQQSYSTPLTF |
| | | | | | | | GGGTKVEIK (SEQ ID NO: |
| | | | | | | | 174) |
| 19. | FTFD | SGIS | CAKD | QASQDI | DASNLET | CQQSYSTPLTF | EVQLLESGGGLVQPGGSLRLSCAA |
| | DYAM | WNSG | IVAA | SNYLN | (SEQ ID | (SEQ ID NO: | SGFTFDDYAMHWVRQAPGKGLEWV |
| | H | SIGY | GHYY | (SEQ | NO: | 173) | SGISWNSGSIGYADSVKGRFTISR |
| | (SEQ | A | YGMD | ID NO: | 159) | | DNSKNTLYLQMNSLRAEDTAVYYC |
| | ID | (SEQ | VW | 138) | | | AKDIVAAGHYYYGMDVWGQGTTVT |
| | NO: | ID | (SEQ | | | | VSSGGGGSGGGGSGGGGSGGGGSD |
| | 135) | NO: | ID | | | | IQMTQSPSSLSASVGDRVTITCQA |
| | | 175) | NO: | | | | SQDISNYLNWYQQKPGKAPKLLIY |
| | | | 176) | | | | DASNLETGVPSRFSGSGSGTDFTL |
| | | | | | | | TISSLQPEDFATYYCQQSYSTPLT |
| | | | | | | | FGGGTKVEIK (SEQ ID NO: |
| | | | | | | | 177) |
| 20. | FTFD | SYID | CARD | QAGQDI | DASNLET | CQQTYSTPITF | EVQLLESGGGLVQPGGSLRLSCAA |
| | DYAM | TSSS | EAAA | SNYLN | (SEQ ID | (SEQ ID NO: | SGFTFDDYAMHWVRQAPGKGLEWV |
| | H | HLYY | GYYG | (SEQ | NO: | 181) | SYIDTSSSHLYYADSVKGRFTISR |
| | (SEQ | A | MDVW | ID NO: | 159) | | DNSKNTLYLQMNSLRAEDTAVYYC |
| | ID | (SEQ | (SEQ | 180) | | | ARDEAAAGYYGMDVWGQGTTVTVS |
| | NO: | ID | ID | | | | SGGGGSGGGGSGGGGSGGGGSDIQ |
| | 135) | NO: | NO: | | | | MTQSPSSLSASVGDRVTITCQAGQ |
| | | 178) | 179) | | | | DISNYLNWYQQKPGKAPKLLIYDA |
| | | | | | | | SNLETGVPSRFSGSGSGTDFTLTI |
| | | | | | | | SSLQPEDFATYYCQQTYSTPITFG |
| | | | | | | | QGTKLEIK (SEQ ID NO: |
| | | | | | | | 182) |
| 21. | FTFS | STIV | CARD | RASQDI | AASSLQS | CQQSYSIPPTF | EVQLLESGGGLVQPGGSLRLSCAA |
| | NAWM | GNGG | NPLR | SNYLN | (SEQ ID | (SEQ ID NO: | SGFTFSNAWMSWVRQAPGKGLEWV |
| | S | ATYY | WQGM | (SEQ | NO: 65) | 187) | STIVGNGGATYYADSVKGRFTISR |
| | (SEQ | A | DVW | ID NO: | | | DNSKNTLYLQMNSLRAEDTAVYYC |
| | ID | (SEQ | (SEQ | 186) | | | ARDNPLRWQGMDVWGQGTLVTVSS |
| | NO: | ID | ID | | | | GGGGSGGGGSGGGGSGGGGSDIQM |
| | 183) | NO: | NO: | | | | TQSPSSLSASVGDRVTITCRASQD |
| | | 184) | 185) | | | | ISNYLNWYQQKPGKAPKLLIYAAS |
| | | | | | | | SLQSGVPSRFSGSGSGTDFTLTIS |
| | | | | | | | SLQPEDFATYYCQQSYSIPPTFGP |
| | | | | | | | GTKVDIK (SEQ ID NO: 188) |
| 22. | FTFS | SYIS | CARA | RASQSI | AASSLQS | CQQSYSTPLTF | EVQLLESGGGLVQPGGSLRLSCAA |
| | SYQM | SSST | NSSS | SSYLN | (SEQ ID | (SEQ ID NO: | SGFTFSSYQMSWVRQAPGKGLEWV |
| | S | YTNY | WYDW | (SEQ | NO: 65) | 173) | SYISSSSTYTNYADSVKGRFTISR |
| | (SEQ | A | YFDL | ID NO: | | | DNSKNTLYLQMNSLRAEDTAVYYC |
| | ID | (SEQ | W | 172) | | | ARANSSSWYDWYFDLWGQGTLVTV |
| | NO: | ID | (SEQ | | | | SSGGGGSGGGGSGGGGSGGGGSDI |
| | 189) | NO: | ID | | | | QMTQSPSSLSASVGDRVTITCRAS |
| | | 190) | NO: | | | | QSISSYLNWYQQKPGKAPKLLIYA |
| | | | 191) | | | | ASSLQSGVPSRFSGSGSGTDFTLT |
| | | | | | | | ISSLQPEDFATYYCQQSYSTPLTF |
| | | | | | | | GGGTKVEIK (SEQ ID NO: |
| | | | | | | | 192) |
| 23. | FTFS | SGIS | CATS | RASQSI | AASNLQR | CQQSYSIPITE | EVQLLESGGGLVQPGGSLRLSCAA |
| | SYAM | GSGG | QAPV | SSWLA | (SEQ ID | (SEQ ID NO: | SGFTFSSYAMHWVRQAPGKGLEWV |
| | H | SAYY | DYYY | (SEQ | NO: | 198) | SGISGSGGSAYYADSVKGRFTISR |
| | (SEQ | A | YGMD | ID NO: | 197) | | DNSKNTLYLQMNSLRAEDTAVYYC |
| | ID | (SEQ | VW | 196) | | | ATSQAPVDYYYYGMDVWGQGTTVT |
| | NO: | ID | (SEQ | | | | VSSGGGGSGGGGSGGGGSGGGGSD |
| | 193) | NO: | ID | | | | IQMTQSPSSLSASVGDRVTITCRA |
| | | 194) | NO: | | | | SQSISSWLAWYQQKPGKAPKLLIY |
| | | | 195) | | | | AASNLQRGVPSRFSGSGSGTDFTL |
| | | | | | | | TISSLQPEDFATYYCQQSYSIPIT |
| | | | | | | | FGQGTKVEIK (SEQ ID NO: |
| | | | | | | | 199) |
| 24. | FTFS | SYIS | CARV | RASQSI | AASSLQS | CQQSYSTPLTF | EVQLVESGGGLVKPGGSLRLSCAA |
| | SYWM | GSSS | GSSG | SSYLN | (SEQ ID | (SEQ ID NO: | SGFTFSSYWMSWVRQAPGKGLEWV |
| | S | YTNY | WYDW | (SEQ | NO: 65) | 173) | SYISGSSSYTNYAAPVKGRFTISR |
| | (SEQ | A | YFDL | ID NO: | | | DDSKNTLYLQMNSLKTEDTAVYYC |
| | ID | (SEQ | W | 172) | | | ARVGSSGWYDWYFDLWGRGTLVTV |
| | NO: | ID | (SEQ | | | | SSGGGGSGGGGSGGGGSGGGGSDI |
| | 169) | NO: | ID | | | | QMTQSPSSLSASVGDRVTITCRAS |
| | | 200) | NO: | | | | QSISSYLNWYQQKPGKAPKLLIYA |
| | | | 201) | | | | ASSLQSGVPSRFSGSGSGTDFTLT |
| | | | | | | | ISSLQPEDFATYYCQQSYSTPLTF |
| | | | | | | | GQGTKVEIK (SEQ ID NO: |
| | | | | | | | 202) |
| 25. | YTLT | GWIN | CAKG | RASDNI | AASSLQS | CQQGYSTPPTF | QVQLVQSGAEVKKPGASVKVSCKA |
| | TWYM | PNRG | DLWG | GSWLA | (SEQ ID | (SEQ ID NO: | SGYTLTTWYMYWVRQAPGQGLEWM |
| | Y | ATNY | AMDV | (SEQ | NO: 65) | 120) | GWINPNRGATNYAQKFQGRVTMTR |
| | (SEQ | A | W | ID NO: | | | DTSTSTVYMELSSLRSEDTAVYYC |
| | ID | (SEQ | (SEQ | 119) | | | AKGDLWGAMDVWGQGTLVTVSSGG |
| | NO: | ID | ID | | | | GGSGGGGSGGGGSGGGGSDIQMTQ |
| | 116) | NO: | NO: | | | | SPSSLSASVGDRVTITCRASDNIG |
| | | 117 | 118) | | | | SWLAWYQQKPGKAPKLLIYAASSL |
| | | | | | | | QSGVPSRFSGSGSGTDFTLTISSL |
| | | | | | | | QPEDFATYYCQQGYSTPPTFGQGT |
| | | | | | | | KVEIK (SEQ ID NO: 121) |
| 26. | YTLT | GWIN | CAKG | RASDNI | AASSLQS | CQQGYSTPPTF | QVQLVQSGAEVKKPGASVKVSCKA |
| | TWYM | PNRG | DLWG | GSWLA | (SEQ ID | (SEQ ID NO: | SGYTLTTWYMYWVRQAPGQGLEWM |
| | Y | ATNY | AMDV | (SEQ | NO: 65) | 120) | GWINPNRGATNYAQKFQGRVTMTR |
| | (SEQ | A | W | ID NO: | | | DTSTSTVYMELSSLRSEDTAVYYC |
| | ID | (SEQ | (SEQ | 119) | | | AKGDLWGAMDVWGQGTTVTVSSGG |
| | NO: | ID | ID | | | | GGSGGGGSGGGGSGGGGSDIQMTQ |
| | 116) | NO: | NO: | | | | SPSSLSASVGDRVTITCRASDNIG |
| | | 117) | 118) | | | | SWLAWYQQKPGKAPKLLIYAASSL |
| | | | | | | | QSGVPSRFSGSGSGTDFTLTISSL |
| | | | | | | | QPEDFATYYCQQGYSTPPTFGQGT |
| | | | | | | | KVEIK (SEQ ID NO: 203) |
| 27. | YTFT | GWMN | CARD | RASQSI | AASSLQS | CQQSYTAPYTF | QVQLVQSGAEVKKPGASVKVSCKA |
| | GYYI | PNSG | PGFL | SSYLH | (SEQ ID | (SEQ ID NO: | SGYTFTGYYIHWVRQAPGQGLEWM |
| | H | NTGY | GYCS | (SEQ | NO: 65) | 208) | GWMNPNSGNTGYAQKFQGRVTMTR |
| | (SEQ | A | GGSC | ID NO: | | | DTSTSTVYMELSSLRSEDTAVYYC |
| | ID | (SEQ | YDGW | 207) | | | ARDPGFLGYCSGGSCYDGWFDPWG |
| | NO: | ID | FDPW | | | | QGTLVTVSSGGGGSGGGGSGGGGS |
| | 204) | NO: | (SEQ | | | | GGGGSDIQMTQSPSSLSASVGDRV |
| | | 205) | ID | | | | TITCRASQSISSYLHWYQQKPGKA |
| | | | NO: | | | | PKLLIYAASSLQSGVPSRFSGSGS |
| | | | 206) | | | | GTDFTLTISSLQPEDFATYYCQQS |
| | | | | | | | YTAPYTFGQGTKLEIK (SEQ ID |
| | | | | | | | NO: 209) |
| 28. | YTFT | GWMN | CARE | RASQGI | DASNLET | CQQSYSTPLTF | QVQLVQSGAEVKKPGASVKVSCKA |
| | DYFL | PTSG | GEGS | NSWLA | (SEQ ID | (SEQ ID NO: | SGYTFTDYFLHWVRQAPGQGLEWM |
| | H | NTGY | GFDY | (SEQ | NO: | 173) | GWMNPTSGNTGYAQKFQGRVTMTR |
| | (SEQ | A | W | ID NO: | 159) | | DTSTSTVYMELSSLRSEDTAVYYC |
| | ID | (SEQ | (SEQ | 213) | | | AREGEGSGFDYWGQGTLVTVSSGG |
| | NO: | ID | ID | | | | GGSGGGGSGGGGSGGGGSDIQMTQ |
| | 210) | NO: | NO: | | | | SPSSLSASVGDRVTITCRASQGIN |
| | | 211) | 212) | | | | SWLAWYQQKPGKAPKLLIYDASNL |
| | | | | | | | ETGVPSRFSGSGSGTDFTLTISSL |
| | | | | | | | QPEDFATYYCQQSYSTPLTFGGGT |
| | | | | | | | KVEIK (SEQ ID NO: 214) |
| 29. | YTFT | AWMN | CARD | RASQGI | AASSLQS | CQQSYSTPWTF | QVQLVQSGAEVKKPGASVKVSCKA |
| | SYYM | PNSG | YDFW | SNYLA | (SEQ ID | (SEQ ID NO: | SGYTFTSYYMHWVRQAPGQGLEWM |
| | H | NTGY | SGSL | (SEQ | NO: 65) | 114) | AWMNPNSGNTGYAQKFQGRVTMTR |
| | (SEQ | A | GYW | ID NO: | | | DTSTSTVYMELSSLRSEDTAVYYC |
| | ID | (SEQ | (SEQ | 218) | | | ARDYDFWSGSLGYWGQGTLVTVSS |
| | NO: | ID | ID | | | | GGGGSGGGGSGGGGSGGGGSDIQM |
| | 215) | NO: | NO: | | | | TQSPSSLSASVGDRVTITCRASQG |
| | | 216) | 217) | | | | ISNYLAWYQQKPGKAPKLLIYAAS |
| | | | | | | | SLQSGVPSRFSGSGSGTDFTLTIS |
| | | | | | | | SLQPEDFATYYCQQSYSTPWTFGQ |
| | | | | | | | GTKVEIK (SEQ ID NO: 219) |
| 30. | YTLT | GWIN | CAKG | RASDNI | AASSLQS | CQQGYSTPPTF | QVQLVQSGAEVKKPGASVKVSCKA |
| | TWYM | PNRG | DLWG | GSWLA | (SEQ ID | (SEQ ID NO: | SGYTLTTWYMYWVRQAPGQGLEWM |
| | Y | ATNY | AMDV | SEQ | NO: 65) | 120) | GWINPNRGATNYAQKFQGRVTMTR |
| | (SEQ | A | W | ID NO: | | | DTSTSTVYMELSSLRSEDTAVYYC |
| | ID | (SEQ | (SEQ | 119) | | | AKGDLWGAMDVWGQGTLVTVSSGG |
| | NO: | ID | ID | | | | GGSGGGGSGGGGSGGGGSDIQMTQ |
| | 116) | NO: | NO: | | | | SPSSLSASVGDRVTITCRASDNIG |
| | | 117) | 118) | | | | SWLAWYQQKPGKAPKLLIYAASSL |
| | | | | | | | QSGVPSRFSGSGSGTDFTLTISSL |
| | | | | | | | QPEDFATYYCQQGYSTPPTFGQGT |
| | | | | | | | KVEIK (SEQ ID NO: 121) |
| 31. | YTFT | GIIN | CARD | RASQSI | DASNLQS | CQQSYSIPITE | QVQLVQSGAEVKKPGASVKVSCKA |
| | SYYM | PSGG | TGYS | GRWLA | (SEQ ID | (SEQ ID NO: | SGYTFTSYYMHWVRQAPGQGLEWM |
| | H | STSY | YGRY | (SEQ | NO: | 198) | GIINPSGGSTSYAQKFQGRVTMTR |
| | (SEQ | A | YYYG | ID NO: | 222) | | DTSTSTVYMELSSLRSEDTAVYYC |
| | ID | (SEQ | MDVW | 221) | | | ARDTGYSYGRYYYYGMDVWGQGTL |
| | NO: | ID | (SEQ | | | | VTVSSGGGGSGGGGGGGGSGGGG |
| | 215) | NO: | ID | | | | SDIQMTQSPSSLSASVGDRVTITC |
| | | 69) | NO: | | | | RASQSIGRWLAWYQQKPGKAPKLL |
| | | | 220) | | | | IYDASNLQSGVPSRFSGSGSGTDF |
| | | | | | | | TLTISSLQPEDFATYYCQQSYSIP |
| | | | | | | | ITFGQGTKVEIK (SEQ ID NO: |
| | | | | | | | 223) |
| 32. | YTLT | GIIN | CARE | RASQGI | AASSLQS | CQQSYSTPLTF | QVQLVQSGAEVKKPGASVKVSCKA |
| | DYYM | PSGG | EYSS | SSWLA | (SEQ ID | (SEQ ID NO: | SGYTLTDYYMHWVRQAPGQGLEWM |
| | H | STSY | SSGY | (SEQ | NO: 65) | 173) | GIINPSGGSTSYAQKFQGRVTMTR |
| | (SEQ | A | FDYW | ID NO: | | | DTSTSTVYMELSSLRSEDTAVYYC |
| | ID | (SEQ | (SEQ | 226) | | | AREEYSSSSGYFDYWGQGTLVTVS |
| | NO: | ID | ID | | | | SGGGGSGGGGSGGGGSGGGGSDIQ |
| | 224) | NO: | NO: | | | | MTQSPSSLSASVGDRVTITCRASQ |
| | | 69) | 225) | | | | GISSWLAWYQQKPGKAPKLLIYAA |
| | | | | | | | SSLQSGVPSRFSGSGSGTDFTLTI |
| | | | | | | | SSLQPEDFATYYCQQSYSTPLTFG |
| | | | | | | | QGTKVEIK (SEQ ID NO: |
| | | | | | | | 227) |
| 33. | YTFT | GWMH | CARD | RASQSI | AASSLQS | CQQSYSVPITF | QVQLVQSGAEVKKPGASVKVSCKA |
| | SYGI | PKSG | TPYY | SSWLA | (SEQ ID | (SEQ ID NO: | SGYTFTSYGISWVRQAPGQGLEWM |
| | S | DTGL | YYGM | (SEQ | NO: 65) | 231) | GWMHPKSGDTGLTQKFQGRVTMTR |
| | (SEQ | T | DVW | ID NO: | | | DTSTSTVYMELSSLRSEDTAVYYC |
| | ID | (SEQ | (SEQ | 196) | | | ARDTPYYYYGMDVWGQGTTVTVSS |
| | NO: | ID | ID | | | | GGGGSGGGGSGGGGSGGGGSDIQM |
| | 228) | NO: | NO: | | | | TQSPSSLSASVGDRVTITCRASQS |
| | | 229) | 230) | | | | ISSWLAWYQQKPGKAPKLLIYAAS |
| | | | | | | | SLQSGVPSRFSGSGSGTDFTLTIS |
| | | | | | | | SLQPEDFATYYCQQSYSVPITFGQ |
| | | | | | | | GTKVEIK (SEQ ID NO: 232) |
| 34. | FTFG | SYIS | CARD | RASQSI | AASSLQS | CQQSYSTPLTF | EVQLVESGGGLVKPGGSLRLSCAA |
| | DYAM | GDIG | VAAT | SSYLN | (SEQ ID | (SEQ ID NO: | SGFTFGDYAMSWVRQAPGKGLEWV |
| | S | YTNY | GNWY | (SEQ | NO: 65) | 173) | SYISGDIGYTNYAAPVKGRFTISR |
| | (SEQ | A | FDLW | ID NO: | | | DDSKNTLYLQMNSLKTEDTAVYYC |
| | ID | (SEQ | (SEQ | 172) | | | ARDVAATGNWYFDLWGRGTLVTVS |
| | NO: | ID | ID | | | | SGGGGSGGGGSGGGGSGGGGSDIQ |
| | 233) | NO: | NO: | | | | MTQSPSSLSASVGDRVTITCRASQ |
| | | 234) | 235) | | | | SISSYLNWYQQKPGKAPKLLIYAA |
| | | | | | | | SSLQSGVPSRFSGSGSGTDFTLTI |
| | | | | | | | SSLQPEDFATYYCQQSYSTPLTFG |
| | | | | | | | GGTKVEIK (SEQ ID NO: |
| | | | | | | | 236) |
| 35. | FSFS | SFIT | CARD | RASQSV | GASTRAT | CQQYGSSPLTE | EVQLLESGGGLVQPGGSLRLSCAA |
| | SYTM | SSSR | RRGD | RNYLA | (SEQ ID | (SEQ ID NO: | SGFSFSSYTMNWVRQAPGKGLEWV |
| | N | TIYY | YGDS | (SEQ | NO: | 242) | SFITSSSRTIYYADSVKGRFTISR |
| | (SEQ | A | WYFD | ID NO: | 241) | | DNSKNTLYLQMNSLRAEDTAVYYC |
| | ID | (SEQ | LW | 240) | | | ARDRRGDYGDSWYFDLWGRGTLVT |
| | NO: | ID | (SEQ | | | | VSSGGGGSGGGGSGGGGSGGGGSE |
| | 237) | NO: | ID | | | | IVMTQSPATLSVSPGERATLSCRA |
| | | 238) | NO: | | | | SQSVRNYLAWYQQKPGQAPRLLIY |
| | | | 239) | | | | GASTRATGIPARFSGSGSGTEFTL |
| | | | | | | | TISSLQSEDFAVYYCQQYGSSPLT |
| | | | | | | | FGGGTKVEIK (SEQ ID NO: |
| | | | | | | | 243) |
| 36. | YTFT | GIIN | CARD | RASQSI | DASNLQS | CQQSYSIPITE | QVQLVQSGAEVKKPGASVKVSCKA |
| | GHYM | PSGG | TGYS | GRWLA | (SEQ ID | (SEQ ID NO: | SGYTFTGHYMHWVRQAPGQGLEWM |
| | H | STSY | YGRY | (SEQ | NO: | 198) | GIINPSGGSTSYAQKFQGRVTMTR |
| | (SEQ | A | YYYG | ID NO: | 222) | | DTSTSTVYMELSSLRSEDTAVYYC |
| | ID | (SEQ | MDVW | 221) | | | ARDTGYSYGRYYYYGMDVWGQGTT |
| | NO: | ID | (SEQ | | | | VTVSSGGGGSGGGGSGGGGSGGGG |
| | 244) | NO: | ID | | | | SDIQMTQSPSSLSASVGDRVTITC |
| | | 69) | NO: | | | | RASQSIGRWLAWYQQKPGKAPKLL |
| | | | 220) | | | | IYDASNLQSGVPSRFSGSGSGTDF |
| | | | | | | | TLTISSLQPEDFATYYCQQSYSIP |
| | | | | | | | ITFGGGTKVEIK (SEQ ID NO: |
| | | | | | | | 245) |
| 37. | YTFS | GWMN | CARG | RASQSI | AASTLQS | CQQSYSTPWTF | QVQLVQSGAEVKKPGASVKVSCKA |
| | KHFV | PNSG | EGGY | SSWLA | (SEQ ID | (SEQ ID NO: | SGYTFSKHFVHWVRQAPGQGLEWM |
| | H | NSGY | YYYG | (SEQ | NO: | 114) | GWMNPNSGNSGYAQKFQGRVTMTR |
| | (SEQ | A | MDVW | ID NO: | 113) | | DTSTSTVYMELSSLRSEDTAVYYC |
| | ID | (SEQ | (SEQ | 196) | | | ARGEGGYYYYGMDVWGQGTLVTVS |
| | NO: | ID | ID | | | | SGGGGSGGGGSGGGGSGGGGSDIQ |
| | 246) | NO: | NO: | | | | MTQSPSSLSASVGDRVTITCRASQ |
| | | 247) | 248) | | | | SISSWLAWYQQKPGKAPKLLIYAA |
| | | | | | | | STLQSGVPSRFSGSGSGTDFTLTI |
| | | | | | | | SSLQPEDFATYYCQQSYSTPWTFG |
| | | | | | | | QGTKVEIK (SEQ ID NO: |
| | | | | | | | 249) |
| 38. | FTFG | SAIG | CAKG | RASQPL | AASSLQS | CQQAISFPLTF | EVQLLESGGGLVQPGGSLRLSCAA |
| | SYSM | TGGG | TPYY | SNWLA | (SEQ ID | (SEQ ID NO: | SGFTFGSYSMSWVRQAPGKGLEWV |
| | S | TYYA | YYYG | (SEQ | NO: 65) | 254) | SAIGTGGGTYYADSVKGRFTISRD |
| | (SEQ | (SEQ | MDVW | ID NO: | | | NSKNTLYLQMNSLRAEDTAVYYCA |
| | ID | ID | (SEQ | 253) | | | KGTPYYYYYGMDVWGQGTMVTVSS |
| | NO: | NO: | ID | | | | GGGGSGGGGSGGGGSGGGGSDIQM |
| | 250) | 251) | NO: | | | | TQSPSSLSASVGDRVTITCRASQP |
| | | | 252) | | | | LSNWLAWYQQKPGKAPKLLIYAAS |
| | | | | | | | SLQSGVPSRFSGSGSGTDFTLTIS |
| | | | | | | | SLQPEDFATYYCQQAISFPLTFGG |
| | | | | | | | GTKVEIK (SEQ ID NO: 255) |
| 39. | YTFT | GWMN | CARD | QSSEDI | AASSLQI | CQQTYSTPYTF | QVQLVQSGAEVKKPGASVKVSCKA |
| | SYYM | PNSG | LGYY | SSSLN | (SEQ ID | (SEQ ID NO: | SGYTFTSYYMHWVRQAPGQGLEWM |
| | H | NTGY | DSSG | (SEQ | NO: | 259) | GWMNPNSGNTGYAQKFQGRVTMTR |
| | (SEQ | A | YFGA | ID NO: | 258) | | DTSTSTVYMELSSLRSEDTAVYYC |
| | ID | (SEQ | FDIW | 257) | | | ARDLGYYDSSGYFGAFDIWGQGTT |
| | NO: | ID | (SEQ | | | | VTVSSGGGGSGGGGSGGGGSGGGG |
| | 215) | NO: | ID | | | | SDIQMTQSPSSLSASVGDRVTITC |
| | | 205) | NO: | | | | QSSEDISSSLNWYQQKPGKAPKLL |
| | | | 256) | | | | IYAASSLQIGVPSRFSGSGSGTDF |
| | | | | | | | TLTISSLQPEDFATYYCQQTYSTP |
| | | | | | | | YTFGQGTKVEIK (SEQ ID NO: |
| | | | | | | | 260) |
| 40. | YTFT | GIIN | CARG | RASQGI | AASNLET | CQQIHSYPLTF | QVQLVQSGAEVKKPGASVKVSCKA |
| | SYGI | PRGG | TRSS | GNWLA | (SEQ ID | (SEQ ID NO: | SGYTFTSYGISWVRQAPGQGLEWM |
| | S | STIF | GWYG | (SEQ | NO: | 265) | GIINPRGGSTIFAQKFQGRVTMTR |
| | (SEQ | A | WFDP | ID NO: | 264) | | DTSTSTVYMELSSLRSEDTAVYYC |
| | ID | (SEQ | W | 263) | | | ARGTRSSGWYGWFDPWGQGTLVTV |
| | NO: | ID | (SEQ | | | | SSGGGGSGGGGSGGGGSGGGGSDI |
| | 228) | NO: | ID | | | | QMTQSPSSLSASVGDRVTITCRAS |
| | | 261) | NO: | | | | QGIGNWLAWYQQKPGKAPKLLIYA |
| | | | 262) | | | | ASNLETGVPSRFSGSGSGTDFTLT |
| | | | | | | | ISSLQPEDFATYYCQQIHSYPLTF |
| | | | | | | | GGGTKVEIK (SEQ ID NO: |
| | | | | | | | 266) |
| 41. | FTFD | SYIS | CARE | RASQSI | AASSLQS | CQQSYSTPLTF | EVQLLESGGGLVQPGGSLRLSCAA |
| | DYGM | SSSS | IAAA | SSYLN | (SEQ ID | (SEQ ID NO: | SGFTFDDYGMSWVRQAPGKGLEWV |
| | S | YIYY | GFYG | (SEQ | NO: 65) | 173) | SYISSSSSYIYYADSVKGRFTISR |
| | (SEQ | A | MDVW | ID NO: | | | DNSKNTLYLQMNSLRAEDTAVYYC |
| | ID | ( SEQ | (SEQ | 172) | | | AREIAAAGFYGMDVWGQGTTVTVS |
| | NO: | ID | ID | | | | SGGGGSGGGGSGGGGSGGGGSDIQ |
| | 267) | NO: | NO: | | | | MTQSPSSLSASVGDRVTITCRASQ |
| | | 268) | 269) | | | | SISSYLNWYQQKPGKAPKLLIYAA |
| | | | | | | | SSLQSGVPSRFSGSGSGTDFTLTI |
| | | | | | | | SSLQPEDFATYYCQQSYSTPLTFG |
| | | | | | | | GGTKVEIK (SEQ ID NO: |
| | | | | | | | 270) |
| 42. | GTLS | GGII | CARD | RASQSV | GASTRAT | CQQYGSSPITF | QVQLVQSGAEVKKPGSSVKVSCKA |
| | RYGV | PIFG | RVYY | SSSYLA | (SEQ ID | (SEQ ID NO: | SGGTLSRYGVSWVRQAPGQGLEWM |
| | S | TTNY | DSSG | (SEQ | NO: | 275) | GGIIPIFGTTNYAQKFQGRVTITA |
| | (SEQ | A | YPTW | ID NO: | 241) | | DESTSTAYMELSSLRSEDTAVYYC |
| | ID | (SEQ | YFDL | 274) | | | ARDRVYYDSSGYPTWYFDLWGRGT |
| | NO: | ID | W | | | | LVTVSSGGGGSGGGGSGGGGSGGG |
| | 271) | NO: | (SEQ | | | | GSEIVMTQSPATLSVSPGERATLS |
| | | 272) | ID | | | | CRASQSVSSSYLAWYQQKPGQAPR |
| | | | NO: | | | | LLIYGASTRATGIPARFSGSGSGT |
| | | | 273) | | | | EFTLTISSLQSEDFAVYYCQQYGS |
| | | | | | | | SPITFGQGTKVEIK (SEQ ID |
| | | | | | | | NO: 276) |
| 43. | FTFD | SGIS | CARD | QASQDI | KASTLES | CQQANSFPLTF | EVQLLESGGGLVQPGGSLRLSCAA |
| | DFAM | GNGD | ASYG | RNYLN | (SEQ ID | (SEQ ID NO: | SGFTFDDFAMHWVRQAPGKGLEWV |
| | H | SRYY | GNYG | (SEQ | NO: | 167) | SGISGNGDSRYYADSVKGRFTISR |
| | (SEQ | A | MDVW | ID NO: | 139) | | DNSKNTLYLQMNSLRAEDTAVYYC |
| | ID | (SEQ | SEQ | 280) | | | ARDASYGGNYGMDVWGQGTTVTVS |
| | NO: | ID | ID | | | | SGGGGSGGGGSGGGGSGGGGSDIQ |
| | 277) | NO: | NO: | | | | MTQSPSSLSASVGDRVTITCQASQ |
| | | 278) | 279) | | | | DIRNYLNWYQQKPGKAPKLLIYKA |
| | | | | | | | STLESGVPSRFSGSGSGTDFTLTI |
| | | | | | | | SSLQPEDFATYYCQQANSFPLTFG |
| | | | | | | | PGTKVDIK (SEQ ID NO: |
| | | | | | | | 281) |
| 44. | FTFS | SAIG | CARE | RASQSI | GASNLQS | CQQSYSTPWTF | EVQLVESGGGLVKPGGSLRLSCAA |
| | SYWM | TGGG | WLVP | SRWLA | (SEQ ID | (SEQ ID NO: | SGFTFSSYWMSWVRQAPGKGLEWV |
| | S | TYYA | YYGM | (SEQ | NO: | 114) | SAIGTGGGTYYAAPVKGRFTISRD |
| | (SEQ | (SEQ | DVW | ID NO: | 284) | | DSKNTLYLQMNSLKTEDTAVYYCA |
| | ID | ID | (SEQ | 283) | | | REWLVPYYGMDVWGQGTTVTVSSG |
| | NO: | NO: | ID | | | | GGGSGGGGSGGGGSGGGGSDIQMT |
| | 169) | 251) | NO: | | | | QSPSSLSASVGDRVTITCRASQSI |
| | | | 282) | | | | SRWLAWYQQKPGKAPKLLIYGASN |
| | | | | | | | LQSGVPSRFSGSGSGTDFTLTISS |
| | | | | | | | LQPEDFATYYCQQSYSTPWTFGQG |
| | | | | | | | TKVEIK (SEQ ID NO: 285) |
| 45. | FSVS | AGIS | CARS | KSSQSV | WASTRQS | CHQYYGHPPTF | EVQLLESGGGLVQPGGSLRLSCAA |
| | SNYM | YDGS | RGIA | LYSSNN | (SEQ ID | (SEQ ID NO: | SGFSVSSNYMSWVRQAPGKGLEWV |
| | S | SKPY | ARPL | KNYLA | NO: | 291) | AGISYDGSSKPYADSVKGRFTISR |
| | (SEQ | A | QHW | (SEQ | 290) | | DNSKNTLYLQMNSLRAEDTAVYYC |
| | ID | (SEQ | (SEQ | ID NO: | | | ARSRGIAARPLQHWGQGTLVTVSS |
| | NO: | ID | ID | 289) | | | GGGGSGGGGSGGGGSGGGGSDIVM |
| | 286) | NO: | NO: | | | | TQSPDSLAVSLGERATINCKSSQS |
| | | 287) | 288) | | | | VLYSSNNKNYLAWYQQKPGQPPKL |
| | | | | | | | LIYWASTRQSGVPDRFSGSGSGTD |
| | | | | | | | FTLTISSLQAEDVAVYYCHQYYGH |
| | | | | | | | PPTFGGGTKVEIK (SEQ ID |
| | | | | | | | NO: 292) |
| 46. | FSVS | AGIS | CARS | KSSQSV | QASTRQS | CHQYYGHPPTF | EVQLLESGGGLVQPGGSLRLSCAA |
| | SNYM | YDGS | RGIA | LYSSNN | (SEQ ID | (SEQ ID NO: | SGFSVSSNYMSWVRQAPGKGLEWV |
| | S | SKPY | ARPL | KNYLA | NO: | 291) | AGISYDGSSKPYADSVKGRFTISR |
| | (SEQ | A | QHW | (SEQ | 293) | | DNSKNTLYLQMNSLRAEDTAVYYC |
| | ID | (SEQ | (SEQ | ID NO: | | | ARSRGIAARPLQHWGQGTLVTVSS |
| | NO: | ID | ID | 289) | | | GGGGSGGGGSGGGGSGGGGSDIVM |
| | 286) | NO: | NO: | | | | TQSPDSLAVSLGERATINCKSSQS |
| | | 287) | 288) | | | | VLYSSNNKNYLAWYQQKPGQPPKL |
| | | | | | | | LIYQASTRQSGVPDRFSGSGSGTD |
| | | | | | | | FTLTISSLQAEDVAVYYCHQYYGH |
| | | | | | | | PPTFGGGTKVEIK (SEQ ID |
| | | | | | | | NO: 294) |
| 47. | FSFS | SAIS | CARD | RASQGI | DASNLET | CQQSYSTPLTF | EVQLLESGGGLVQPGGSLRLSCAA |
| | DYGM | GSGG | GGWQ | SNNLN | (SEQ ID | (SEQ ID NO: | SGFSFSDYGMHWVRQAPGKGLEWV |
| | H | STYY | PAAI | (SEQ | NO: | 173) | SAISGSGGSTYYADSVKGRFTISR |
| | (SEQ | A | LDYW | ID NO: | 159) | | DNSKNTLYLQMNSLRAEDTAVYYC |
| | ID | (SEQ | (SEQ | 105) | | | ARDGGWQPAAILDYWGQGTLVTVS |
| | NO: | ID | ID | | | | SGGGGSGGGGSGGGGSGGGGSDIQ |
| | 295) | NO: | NO: | | | | MTQSPSSLSASVGDRVTITCRASQ |
| | | 103) | 296) | | | | GISNNLNWYQQKPGKAPKLLIYDA |
| | | | | | | | SNLETGVPSRFSGSGSGTDFTLTI |
| | | | | | | | SSLQPEDFATYYCQQSYSTPLTFG |
| | | | | | | | GGTKVEIK (SEQ ID NO: |
| | | | | | | | 297) |
| 48. | FTFS | SVIY | CARD | RASQGI | DASNLET | CQQSYSTCYTF | EVQLLESGGGLVQPGGSLRLSCAA |
| | DHGM | GGES | PAVA | SNYLA | (SEQ ID | (SEQ ID NO: | SGFTFSDHGMHWVRQAPGKGLEWV |
| | H | TYYA | GGGI | (SEQ | NO: | 301) | SVIYGGESTYYADSVKGRFTISRD |
| | (SEQ | (SEQ | FDYW | ID NO: | 159) | | NSKNTLYLQMNSLRAEDTAVYYCA |
| | ID | ID | (SEQ | 218) | | | RDPAVAGGGIFDYWGQGTLVTVSS |
| | NO: | NO: | ID | | | | GGGGSGGGGSGGGGSGGGGSDIQM |
| | 298) | 299) | NO: | | | | TQSPSSLSASVGDRVTITCRASQG |
| | | | 300) | | | | ISNYLAWYQQKPGKAPKLLIYDAS |
| | | | | | | | NLETGVPSRFSGSGSGTDFTLTIS |
| | | | | | | | SLQPEDFATYYCQQSYSTCYTFGQ |
| | | | | | | | GTKLEIK (SEQ ID NO: 302) |
| 49. | DTFT | GWIN | CARS | RASQTI | DASTLQS | CQQYSSYPLTF | QVQLVQSGAEVKKPGASVKVSCKA |
| | GYYI | PNSG | GLWL | SIWLA | (SEQ ID | (SEQ ID NO: | SGDTFTGYYIHWVRQAPGQGLEWM |
| | H | GTNY | GSYY | (SEQ | NO: | 308) | GWINPNSGGTNYAQKFQGRVTMTR |
| | (SEQ | A | GMDV | ID NO: | 307) | | DTSTSTVYMELSSLRSEDTAVYYC |
| | ID | (SEQ | W | 306) | | | ARSGLWLGSYYGMDVWGQGTLVTV |
| | NO: | ID | (SEQ | | | | SSGGGGSGGGGSGGGGSGGGGSDI |
| | 303) | NO: | ID | | | | QMTQSPSSLSASVGDRVTITCRAS |
| | | 304) | NO: | | | | QTISIWLAWYQQKPGKAPKLLIYD |
| | | | 305) | | | | ASTLQSGVPSRFSGSGSGTDFTLT |
| | | | | | | | ISSLQPEDFATYYCQQYSSYPLTF |
| | | | | | | | GQGTKVEIK (SEQ ID NO: |
| | | | | | | | 309) |
| 50. | YTFT | GWIN | CARS | RASHFI | AASTLQS | CQQSYSGISF | QVQLVQSGAEVKKPGASVKVSCKA |
| | SYDI | PNSG | PYYY | SRWVA | (SEQ ID | (SEQ ID NO: | SGYTFTSYDINWVRQAPGQGLEWM |
| | N | TTGY | YGMD | (SEQ | NO: | 314) | GWINPNSGTTGYAQKFQGRVTMTR |
| | (SEQ | A | VW | ID NO: | 113) | | DTSTSTVYMELSSLRSEDTAVYYC |
| | ID | (SEQ | (SEQ | 313) | | | ARSPYYYYGMDVWGQGTTVTVSSG |
| | NO: | ID | ID | | | | GGGSGGGGSGGGGSGGGGSDIQMT |
| | 310) | NO: | NO: | | | | QSPSSLSASVGDRVTITCRASHFI |
| | | 311) | 312) | | | | SRWVAWYQQKPGKAPKLLIYAAST |
| | | | | | | | LQSGVPSRFSGSGSGTDFTLTISS |
| | | | | | | | LQPEDFATYYCQQSYSGISFGPGT |
| | | | | | | | KVDIK (SEQ ID NO: 315) |
| 51. | FTEN | SRIN | CARG | RASQSV | ATSSRAS | CQQYYSGLTF | EVQLLESGGGLVQPGGSLRLSCAA |
| | NYGM | SDGS | AYYY | SGSYLA | (SEQ ID | (SEQ ID NO: | SGFTFNNYGMNWVRQAPGKGLEWV |
| | N | STSY | YYMD | (SEQ | NO: | 321) | SRINSDGSSTSYADSVKGRFTISR |
| | (SEQ | A | VW | ID NO: | 320) | | DNSKNTLYLQMNSLRAEDTAVYYC |
| | ID | (SEQ | (SEQ | 319) | | | ARGAYYYYYMDVWGQGTLVTVSSG |
| | NO: | ID | ID | | | | GGGSGGGGSGGGGSGGGGSEIVMT |
| | 316) | NO: | NO: | | | | QSPATLSVSPGERATLSCRASQSV |
| | | 317) | 318) | | | | SGSYLAWYQQKPGQAPRLLIYATS |
| | | | | | | | SRASGIPARFSGSGSGTEFTLTIS |
| | | | | | | | SLQSEDFAVYYCQQYYSGLTFGQG |
| | | | | | | | TKVEIK (SEQ ID NO: 322) |
| 52. | FTFS | AHIW | CARD | RASQDI | DASSLET | CQQATSLPLTF | EVQLLESGGGLVQPGGSLRLSCAA |
| | NSDM | NDGS | RTDP | RNYLG | (SEQ ID | (SEQ ID NO: | SGFTFSNSDMNWVRQAPGKGLEWV |
| | N | QKYY | GYSS | (SEQ | NO: | 328) | AHIWNDGSQKYYADSVKGRFTISR |
| | (SEQ | A | AMDV | ID NO: | 327) | | DNSKNTLYLQMNSLRAEDTAVYYC |
| | ID | (SEQ | W | 326) | | | ARDRTDPGYSSAMDVWGQGTTVTV |
| | NO: | ID | (SEQ | | | | SSGGGGSGGGGSGGGGSGGGGSDI |
| | 323) | NO: | ID | | | | QMTQSPSSLSASVGDRVTITCRAS |
| | | 324) | NO: | | | | QDIRNYLGWYQQKPGKAPKLLIYD |
| | | | 325) | | | | ASSLETGVPSRFSGSGSGTDFTLT |
| | | | | | | | ISSLQPEDFATYYCQQATSLPLTF |
| | | | | | | | GGGTKVEIK (SEQ ID NO: |
| | | | | | | | 329) |
| 53. | YTFT | GWMN | CAKD | RASQDI | QASSLES | CQQSYTIPLTF | QVQLVQSGAEVKKPGASVKVSCKA |
| | SYDI | PNSG | SDYS | TNDLG | (SEQ ID | (SEQ ID NO: | SGYTFTSYDINWVRQAPGQGLEWM |
| | N | NTGY | NLLW | (SEQ | NO: | 333) | GWMNPNSGNTGYAQKFQGRVTMTR |
| | (SEQ | A | DYW | ID NO: | 332) | | DTSTSTVYMELSSLRSEDTAVYYC |
| | ID | (SEQ | (SEQ | 331) | | | AKDSDYSNLLWDYWGQGTLVTVSS |
| | NO: | ID | ID | | | | GGGGSGGGGSGGGGSGGGGSDIQM |
| | 310) | NO: | NO: | | | | TQSPSSLSASVGDRVTITCRASQD |
| | | 205) | 330) | | | | ITNDLGWYQQKPGKAPKLLIYQAS |
| | | | | | | | SLESGVPSRFSGSGSGTDFTLTIS |
| | | | | | | | SLQPEDFATYYCQQSYTIPLTFGQ |
| | | | | | | | GTKVEIK (SEQ ID NO: 334) |
| 54. | FTFG | AVVS | CAKD | RASQNI | DASNLET | CQQANSFPPTF | EVQLLESGGGLVQPGGSLRLSCAA |
| | DYAM | YDGT | ICSS | NNYVN | (SEQ ID | (SEQ ID NO: | SGFTFGDYAMSWVRQAPGKGLEWV |
| | S | NKYY | TSCY | (SEQ | NO: | 338) | AVVSYDGTNKYYADSVKGRFTISR |
| | (SEQ | A | FDLW | ID NO: | 159) | | DNSKNTLYLQMNSLRAEDTAVYYC |
| | ID | (SEQ | (SEQ | 337) | | | AKDICSSTSCYFDLWGRGTLVTVS |
| | NO: | ID | ID | | | | SGGGGSGGGGSGGGGSGGGGSDIQ |
| | 233) | NO: | NO: | | | | MTQSPSSLSASVGDRVTITCRASQ |
| | | 335) | 336) | | | | NINNYVNWYQQKPGKAPKLLIYDA |
| | | | | | | | SNLETGVPSRFSGSGSGTDFTLTI |
| | | | | | | | SSLQPEDFATYYCQQANSFPPTFG |
| | | | | | | | QGTRLEIK (SEQ ID NO: |
| | | | | | | | 339) |
| 55. | YTFT | GIID | CARE | RASQGI | ATSSLQT | CQQTYSIPITF | QVQLVQSGAEVKKPGASVKVSCKA |
| | SYYM | PSGG | EWSS | SSYLA | (SEQ ID | (SEQ ID NO: | SGYTFTSYYMHWVRQAPGQGLEWM |
| | H | STSY | GGVG | (SEQ | NO: | 344) | GIIDPSGGSTSYAQKFQGRVTMTR |
| | (SEQ | A | YFDY | ID NO: | 343) | | DTSTSTVYMELSSLRSEDTAVYYC |
| | ID | (SEQ | W | 342) | | | AREEWSSGGVGYFDYWGQGTLVTV |
| | NO: | ID | (SEQ | | | | SSGGGGSGGGGSGGGGSGGGGSDI |
| | 215) | NO: | ID | | | | QMTQSPSSLSASVGDRVTITCRAS |
| | | 340) | NO: | | | | QGISSYLAWYQQKPGKAPKLLIYA |
| | | | 341) | | | | TSSLQTGVPSRFSGSGSGTDFTLT |
| | | | | | | | ISSLQPEDFATYYCQQTYSIPITE |
| | | | | | | | GQGTRLEIK (SEQ ID NO: |
| | | | | | | | 345) |
| 56. | FTFD | SAIS | CARD | QASQDI | KASSLES | CQQANSYPVTF | EVQLLESGGGLVQPGGSLRLSCAA |
| | DYAM | GGGE | ASYG | RNYLN | (SEQ ID | (SEQ ID NO: | SGFTFDDYAMHWVRQAPGKGLEWV |
| | H | DTYY | GNYG | (SEQ | NO: | 348) | SAISGGGEDTYYADSVKGRFTISR |
| | (SEQ | A | MDVW | ID NO: | 347) | | DNSKNTLYLQMNSLRAEDTAVYYC |
| | ID | (SEQ | (SEQ | 280) | | | ARDASYGGNYGMDVWGQGTTVTVS |
| | NO: | ID | ID | | | | SGGGGSGGGGSGGGGSGGGGSDIQ |
| | 135) | NO: | NO: | | | | MTQSPSSLSASVGDRVTITCQASQ |
| | | 346) | 279) | | | | DIRNYLNWYQQKPGKAPKLLIYKA |
| | | | | | | | SSLESGVPSRFSGSGSGTDFTLTI |
| | | | | | | | SSLQPEDFATYYCQQANSYPVTFG |
| | | | | | | | GGTKVEIK (SEQ ID NO: |
| | | | | | | | 349) |
| 57. | YTFT | GIIN | CARD | RASQGI | AASSLQG | CQQSYSLPYTF | QVQLVQSGAEVKKPGASVKVSCKA |
| | SYYM | PSGG | SVAG | SNYFA | (SEQ ID | (SEQ ID NO: | SGYTFTSYYMHWVRQAPGQGLEWM |
| | H | STSY | TGGR | (SEQ | NO: | 353) | GIINPSGGSTSYAQKFQGRVTMTR |
| | (SEQ | A | YYGM | ID NO: | 352) | | DTSTSTVYMELSSLRSEDTAVYYC |
| | ID | (SEQ | DVW | 351) | | | ARDSVAGTGGRYYGMDVWGQGTLV |
| | NO: | ID | (SEQ | | | | TVSSGGGGSGGGGSGGGGSGGGGS |
| | 215) | NO: | ID | | | | DIQMTQSPSSLSASVGDRVTITCR |
| | | 69) | NO: | | | | ASQGISNYFAWYQQKPGKAPKLLI |
| | | | 350) | | | | YAASSLQGGVPSRFSGSGSGTDFT |
| | | | | | | | LTISSLQPEDFATYYCQQSYSLPY |
| | | | | | | | TFGQGTKLEIK (SEQ ID NO: |
| | | | | | | | 354) |
| 58. | YTFT | GIIN | CTTA | RASQGI | AASSLQS | CQQYYSNADF | QVQLVQSGAEVKKPGASVKVSCKA |
| | GYYM | PSGG | DYYY | SNYLA | (SEQ ID | (SEQ ID NO: | SGYTFTGYYMHWVRQAPGQGLEWM |
| | H | NTKY | YMDV | (SEQ | NO: 65) | 357) | GIINPSGGNTKYAQKFQGRVTMTR |
| | (SEQ | A | W | ID NO: | | | DTSTSTVYMELSSLRSEDTAVYYC |
| | ID | (SEQ | (SEQ | 218) | | | TTADYYYYMDVWGKGTTVTVSSGG |
| | NO: | ID | ID | | | | GGSGGGGSGGGGSGGGGSDIQMTQ |
| | 128) | NO: | NO: | | | | SPSSLSASVGDRVTITCRASQGIS |
| | | 355) | 356) | | | | NYLAWYQQKPGKAPKLLIYAASSL |
| | | | | | | | QSGVPSRFSGSGSGTDFTLTISSL |
| | | | | | | | QPEDFATYYCQQYYSNADFGQGTK |
| | | | | | | | VEIK (SEQ ID NO: 358) |
| 59. | FTFS | SYIS | CARD | RASQSV | SSLQS | QQYKSYPVT | EVQLLESGGGLVQPGGSLRLSCAA |
| | DFWM | GDSG | RPYY | SRSLA | (SEQ ID | (SEQ ID NO: | SGFTFSDFWMHWVRQAPGKGLEWI |
| | H | YTNY | YYMD | (SEQ | NO: | 363) | SYISGDSGYTNYADSVKGRFTISR |
| | (SEQ | A | VW | ID NO: | 362) | | DNSKNTLYLQMNSLRAEDTAVYYC |
| | ID | (SEQ | (SEQ | 361) | | | ARDRPYYYYMDVWGKGTTVTVSSG |
| | NO: | ID | ID | | | | GGGSGGGGSGGGGSGGGGSDIQMT |
| | 359) | NO: | NO: | | | | QSPSSLSASVGDRVTITCRASQSV |
| | | 170) | 360) | | | | SRSLAWYQQKPGKAPKLLIYAASS |
| | | | | | | | LQSGVPSRFSGSGSGTDFTLTISS |
| | | | | | | | LQPEDFATYYCQQYKSYPVTFGQG |
| | | | | | | | TKVEIK (SEQ ID NO: 364) |
| 60. | FTFD | SDIS | CAKD | QASQDI | SYLQS | QQAHNYPIT | EVQLLESGGGLVQPGGSLRLSCAA |
| | DYTM | GSGG | VVVA | SNYLN | (SEQ ID | (SEQ ID NO: | SGFTFDDYTMHWVRQAPGKGLEWV |
| | H | STYY | GTPL | (SEQ | NO: | 369) | SDISGSGGSTYYADSVKGRFTISR |
| | (SEQ | A | HFDY | ID NO: | 368) | | DNSKNTLYLQMNSLRAEDTAVYYC |
| | ID | (SEQ | W | 138) | | | AKDVVVAGTPLHFDYWGQGTLVTV |
| | NO: | ID | (SEQ | | | | SSGGGGSGGGGSGGGGSGGGGSDI |
| | 365) | NO: | ID | | | | QMTQSPSSLSASVGDRVTITCQAS |
| | | 366) | NO: | | | | QDISNYLNWYQQKPGKAPKLLIYA |
| | | | 367) | | | | ASYLQSGVPSRFSGSGSGTDFTLT |
| | | | | | | | ISSLQPEDFATYYCQQAHNYPITF |
| | | | | | | | GQGTRLEIK (SEQ ID NO: |
| | | | | | | | 370) |
| 61. | FTFS | ASIS | CARE | RASQSI | SSLQS | QQANAFPPT | EVQLLESGGGLVQPGGSLRLSCAA |
| | NAWM | STSA | VVGA | STWLA | (SEQ ID | (SEQ ID NO: | SEFTFSNAWMSWVRQAPGKGLEWV |
| | S | YIDY | TTFD | (SEQ | NO: | 374) | ASISSTSAYIDYADSVKGRFTISR |
| | (SEQ | A | YW | ID NO: | 362) | | DNSKNTLYLQMNSLRAEDTAVYYC |
| | ID | (SEQ | (SEQ | 373) | | | AREVVGATTFDYWGQGTLVTVSSG |
| | NO: | ID | ID | | | | GGGSGGGGSGGGGSGGGGSDIQMT |
| | 183) | NO: | NO: | | | | QSPSSLSASVGDRVTITCRASQSI |
| | | 371) | 372) | | | | STWLAWYQQKPGKAPKLLIYAASS |
| | | | | | | | LQSGVPSRFSGSGSGTDFTLTISS |
| | | | | | | | LQPEDFATYYCQQANAFPPTFGQG |
| | | | | | | | TRLEIK (SEQ ID NO: 375) |
| 62. | GTFS | GWME | CAKG | KSSQSV | STRES | QQYYSTPPT | QVQLVQSGAEVKKPGSSVKVSCKA |
| | SYAI | PHTG | GFSW | LYSSNN | (SEQ ID | (SEQ ID NO: | SGGTFSSYAISWVRQAPGQGLEWM |
| | S | NTRY | FDPW | KNYLA | NO: | 379) | GWMEPHTGNTRYAQKFQGRVTITA |
| | (SEQ | A | (SEQ | (SEQ | 378) | | DESTSTAYMELSSLRSEDTAVYYC |
| | ID | (SEQ | ID | ID NO: | | | AKGGFSWFDPWGQGTLVTVSSGGG |
| | NO: | ID | NO: | 289) | | | GSGGGGSGGGGSGGGGSDIVMTQS |
| | 77) | NO: | 377) | | | | PDSLAVSLGERATINCKSSQSVLY |
| | | 376) | | | | | SSNNKNYLAWYQQKPGQPPKLLIY |
| | | | | | | | WASTRESGVPDRFSGSGSGTDFTL |
| | | | | | | | TISSLQAEDVAVYYCQQYYSTPPT |
| | | | | | | | FGQGTRLEIK (SEQ ID NO: |
| | | | | | | | 380) |
| 63. | FTFD | ASIT | CARE | RASQGI | STRAT | QQYYTYPPT | EVQLLESGGGLVKPGGSLRLSCAA |
| | DYAM | SSSA | RVDW | SNSYLA | (SEQ ID | (SEQ ID NO: | SGFTFDDYAMHWVRQAPGKGLEWV |
| | H | FIDY | NSYF | (SEQ | NO: | 385) | ASITSSSAFIDYAASVKGRFTISR |
| | (SEQ | A | DLW | ID NO: | 384) | | DDSKNTLYLQMNSLKTEDTAVYYC |
| | ID | (SEQ | (SEQ | 383) | | | ARERVDWNSYFDLWGRGTLVTVSS |
| | NO: | ID | ID | | | | GGGGSGGGGSGGGGSGGGGSEIVM |
| | 135) | NO: | NO: | | | | TQSPATLSVSPGERATLSCRASQG |
| | | 381) | 382) | | | | ISNSYLAWYQQKPGQAPRLLIYGA |
| | | | | | | | STRATGIPARFSGSGSGTEFTLTI |
| | | | | | | | SSLQSEDFAVYYCQQYYTYPPTFG |
| | | | | | | | PGTKVDIK (SEQ ID NO: |
| | | | | | | | 386) |
| 64. | FAFS | AGTS | CARE | RASQGI | ANLEG | QQSDIFPPT | EVQLLESGGGLVKPGGSLRLSCAA |
| | SHWM | GSGE | TYYY | SNYLA | (SEQ ID | (SEQ ID NO: | SGFAFSSHWMHWVRQAPGKGLEWV |
| | H | SRDY | YYMD | (SEQ | NO: | 391) | AGTSGSGESRDYADFVKGRFTISR |
| | (SEQ | A | VW | ID NO: | 390) | | DDSKNTLYLQMNSLKTEDTAVYYC |
| | ID | (SEQ | (SEQ | 218) | | | ARETYYYYYMDVWGKGTTVTVSSG |
| | NO: | ID | ID | | | | GGGSGGGGSGGGGSGGGGSDIQMT |
| | 387) | NO: | NO: | | | | QSPSSLSASVGDRVTITCRASQGI |
| | | 388) | 389) | | | | SNYLAWYQQKPGKAPKLLIYDAAN |
| | | | | | | | LEGGVPSRFSGSGSGTDFTLTISS |
| | | | | | | | LQPEDFATYYCQQSDIFPPTFGQG |
| | | | | | | | TKVEIK (SEQ ID NO: 392) |
| 65. | YTFT | GWIN | CARE | RASQSI | SSLQS | QQSNSFPLT | QVQLVQSGAEVKKPGASVKVSCKA |
| | RHWI | VKTG | SSGW | SNYLA | (SEQ ID | (SEQ ID NO: | SGYTFTRHWIHWVRQAPGQGLEWM |
| | H | GAGY | YGTD | (SEQ | NO: | 397) | GWINVKTGGAGYAQKFQGRVTMTR |
| | (SEQ | A | VW | ID NO: | 362) | | DTSTSTVYMELSSLRSEDTAVYYC |
| | ID | (SEQ | (SEQ | 396) | | | ARESSGWYGTDVWGQGTTVTVSSG |
| | NO: | ID | ID | | | | GGGSGGGGSGGGGSGGGGSDIQMT |
| | 393) | NO: | NO: | | | | QSPSSLSASVGDRATITCRASQSI |
| | | 394) | 395) | | | | SNYLAWYQQKPGKAPKLLIYAASS |
| | | | | | | | LQSGVPSRFSGSGSGTDFTLTISS |
| | | | | | | | LQPEDFATYYCQQSNSFPLTFGGG |
| | | | | | | | TKVEIK (SEQ ID NO: 398) |
| 66. | FTFS | AAIS | CARE | QASQDI | NLRS | QQANSFPVT | EVQLLESGGGLVQPGGSLRLSCAA |
| | SYWM | YDGK | NKQW | SNFVN | (SEQ ID | (SEQ ID NO: | SGFTFSSYWMHWVRQAPGKGLEWV |
| | H | YKDY | LASF | (SEQ | NO: | 403) | AAISYDGKYKDYEDSVKGRFTISR |
| | (SEQ | E | DYW | ID NO: | 402) | | DNSKNTLYLQMNSLRAEDTAVYYC |
| | ID | (SEQ | (SEQ | 401) | | | ARENKQWLASFDYWGQGTLVTVSS |
| | NO: | ID | ID | | | | GGGGSGGGGSGGGGSGGGGSDIQM |
| | 83) | NO: | NO: | | | | TQSPSSLSASVGDRVTITCQASQD |
| | | 399) | 400) | | | | ISNFVNWYQQKPGKAPKLLIYAAN |
| | | | | | | | LRSGVPSRFSGSGSGTDFTLTISS |
| | | | | | | | LQPEDFATYYCQQANSFPVTFGPG |
| | | | | | | | TKVDIK (SEQ ID NO: 404) |

[0471] In some embodiments, the antibody comprises a CDR set as set forth in Table 6 or Table 7. In some embodiments, the antibody comprises the CDRs of Clone ID: 6, Clone ID: 59, or Clone ID: 63 of Table 6.

[0472] The antibodies, can be in a scFv format, which are also illustrated in a non-limiting embodiment in Table 6.

[0473] In some embodiments, the MAdCAM antibody is selected from the following table, which can be in a IgG format as illustrated in Table 7.

TABLE 7

| Clone | | | | | | | | |
|---|---|---|---|---|---|---|---|---|
| ID | HCDR1 | HCDR2 | HCDR3 | LCDR1 | LCDR2 | LCDR3 | VH | VK |
| 1. | FTFSS | AVISD | CTTSK | QASQD | AASSLQ | CQQGY | EVQLLESGGGLVQ | DIQMTQSPSSLSASV |
| | YGMH | DGSDK | YYYYY | ISKSL | S (SEQ | STPLT | PGGSLRLSCAASG | GDRVTITCQASQDIS |
| | (SEQ | YYA | GMDVW | N | ID NO: | F | FTFSSYGMHWVRQ | KSLNWYQQKPGKAPK |
| | ID | (SEQ | (SEQ | (SEQ | 65) | (SEQ | APGKGLEWVAVIS | LLIYAASSLQSGVPS |
| | NO: | ID | ID | ID | | ID | DDGSDKYYADSVK | RFSGSGSGTDFTLTI |
| | 61) | NO: | NO: | NO: | | NO: | GRFTISRDNSKNT | SSLQPEDFATYYCQQ |
| | | 62) | 63) | 64) | | 66) | LYLQMNSLRAEDT | GYSTPLTFGGGTKVE |
| | | | | | | | AVYYCTTSKYYYY | IK (SEQ ID NO: |
| | | | | | | | YGMDVWGQGTTVT | 406) |
| | | | | | | | VSS (SEQ ID | |
| | | | | | | | NO: 405) | |
| 2. | YPFIG | GIINP | CAREG | RASQS | GASTLE | CQQTW | QVQLVQSGAEVKK | DIQMTQSPSSLSASV |
| | YYLH | SGGST | RLSYG | ISSYL | S | GPPFT | PGASVKVSCKASG | GDRVTITCRASQSIS |
| | (SEQ | SYA | MDAW | A | (SEQ | F | YPFIGYYLHWVRQ | SYLAWYQQKPGKAPK |
| | ID | (SEQ | (SEQ | (SEQ | ID NO: | (SEQ | APGQGLEWMGIIN | LLIYGASTLESGVPS |
| | NO: | ID | ID | ID | 72) | ID | PSGGSTSYAQKFQ | RFSGSGSGTDFTLTI |
| | 68) | NO: | NO: | NO: | | NO: | GRVTMTRDTSTST | SSLQPEDFATYYCQQ |
| | | 69) | 70) | 71) | | 73) | VYMELSSLRSEDT | TWGPPFTFGQGTKLE |
| | | | | | | | AVYYCAREGRLSY | IK (SEQ ID NO: |
| | | | | | | | GMDAWGQGTLVTV | 408) |
| | | | | | | | SS (SEQ ID | |
| | | | | | | | NO: 407) | |
| 3. | YPFIG | GIINP | CAREG | RASQS | GASTLE | CQQTW | QVQLVQSGAEVKK | DIQMTQSPSSLSASV |
| | QYLH | SGGST | RLSYG | ISSYL | S (SEQ | GPPFT | PGASVKVSCKASG | GDRVTITCRASQSIS |
| | (SEQ | SYA | MDAW | A | ID NO: | F | YPFIGQYLHWVRQ | SYLAWYQQKPGKAPK |
| | ID | (SEQ | (SEQ | (SEQ | 72) | (SEQ | APGQGLEWMGIIN | LLIYGASTLESGVPS |
| | NO: | ID | ID | ID | | ID | PSGGSTSYAQKFQ | RFSGSGSGTDFTLTI |
| | 75 | NO: | NO: | NO: | | NO: | GRVTMTRDTSTST | SSLQPEDFATYYCQQ |
| | | 69) | 70) | 71) | | 73) | VYMELSSLRSEDT | TWGPPFTFGQGTKLE |
| | | | | | | | AVYYCAREGRLSY | IK (SEQ ID NO: |
| | | | | | | | GMDAWGQGTLVTV | 408) |
| | | | | | | | SS (SEQ ID | |
| | | | | | | | NO: 409) | |
| 4. | GTFSS | GSINP | CAKDK | QASQD | AASSLQ | CQQSY | QVQLVQSGAEVKK | DIQMTQSPSSLSASV |
| | YAIS | SGDTT | AQWLV | ISNSL | S (SEQ | SSVIT | PGASVKVSCKASG | GDRVTITCQASQDIS |
| | (SEQ | SYA | GYFDY | N | ID NO: | F | GTFSSYAISWVRQ | NSLNWYQQKPGKAPK |
| | ID | (SEQ | W | (SEQ | 65) | (SEQ | APGQGLEWMGSIN | LLIYAASSLQSGVPS |
| | NO: | ID | (SEQ | ID | | ID | PSGDTTSYAQKFQ | RFSGSGSGTDFTLTI |
| | 77) | NO: | ID | NO: | | NO: | GRVTMTRDTSTST | SSLQPEDFATYYCQQ |
| | | 78) | NO: | 80) | | 81) | VYMELSSLRSEDT | SYSSVITFGQGTKVE |
| | | | 79) | | | | AVYYCAKDKAQWL | IK (SEQ ID NO: |
| | | | | | | | VGYFDYWGQGTLV | 411) |
| | | | | | | | TVSS (SEQ ID | |
| | | | | | | | NO: 410) | |
| 5. | FTFSS | SSISP | CAREV | RASQG | GASSLQ | CQQAN | EVQLLESGGGLVQ | DIQMTQSPSSLSASV |
| | YWMH | GGSNI | QLSHY | ISNSL | S (SEQ | SFPFT | PGGSLRLSCAASG | GDRVTITCRASQGIS |
| | (SEQ | DYA | DYW | A | ID NO: | F | FTFSSYWMHWVRQ | NSLAWYQQKPGKAPK |
| | ID | (SEQ | (SEQ | (SEQ | 87) | (SEQ | APGKGLEWVSSIS | LLIYGASSLQSGVPS |
| | NO: | ID | ID | ID | | ID | PGGSNIDYADSVK | RFSGSGSGTDFTLTI |
| | 83) | NO: | NO: | NO: | | NO: | GRFTISRDNSKNT | SSLQPEDFATYYCQQ |
| | | 84) | 85) | 86) | | 88) | LYLQMNSLRAEDT | ANSFPFTFGQGTKVE |
| | | | | | | | AVYYCAREVQLSH | IK (SEQ ID NO: |
| | | | | | | | YDYWGQGTLVTVS | 413) |
| | | | | | | | S (SEQ ID NO: | |
| | | | | | | | 412) | |
| 6. | FTFNN | SRINS | CAREG | RASQI | GASSLQ | CQQSY | EVQLLESGGGLVQ | DIQMTQSPSSLSASV |
| | YAFH | YGTST | PVAGY | IGTNL | S (SEQ | RLPFT | PGGSLRLSCAASG | GDRVTITCRASQIIG |
| | (SEQ | TYA | WYFDL | A | ID NO: | F | FTFNNYAFHWVRQ | TNLAWYQQKPGKAPK |
| | ID | (SEQ | W | (SEQ | 87) | (SEQ | APGKGLEWVSRIN | LLIYGASSLQSGVPS |
| | NO: | ID | (SEQ | ID | | ID | SYGTSTTYADSVK | RFSGSGSGTDFTLTI |
| | 90) | NO: | ID | NO: | | NO: | GRFTISRDNSKNT | SSLQPEDFATYYCQQ |
| | | 91) | NO: | 93) | | 94) | LYLQMNSLRAEDT | SYRLPFTFGQGTKVE |
| | | | 92) | | | | AVYYCAREGPVAG | IK (SEQ ID NO: |
| | | | | | | | YWYFDLWGQGTLV | 415) |
| | | | | | | | TVSS (SEQ ID | |
| | | | | | | | NO: 414) | |
| 7. | FTFSD | AIISH | CAKPY | RASRG | STLQS | QQAYS | EVQLLESGGGLVQ | DIQMTQSPSSLSASV |
| | YQMS | ADGGF | SSGWS | ITNDL | (SEQ | FPWT | PGGSLRLSCAASG | GDRVTITCRASRGIT |
| | (SEQ | KDYA | AVYYF | G | ID NO: | (SEQ | FTFSDYQMSWVRQ | NDLGWYQQKPGKAPK |
| | ID | (SEQ | DYW | (SEQ | 420) | ID | APGKGLEWVAIIS | LLIYAASTLQSGVPS |
| | NO: | ID | (SEQ | ID | | NO: | HADGGFKDYADSV | RFSGSGSGTDFTLTI |
| | 416) | NO: | ID | NO: | | 421) | KGRFTISRDNSKN | SSLQPEDFATYYCQQ |
| | | 417) | NO: | 419) | | | TLYLQMNSLRAED | AYSFPWTFGQGTKVE |
| | | | 418) | | | | TAVYYCAKPYSSG | IK (SEQ ID NO: |
| | | | | | | | WSAVYYFDYWGQG | 423) |
| | | | | | | | TLVTVSS (SEQ | |
| | | | | | | | ID NO: 422) | |
| 8. | YTFTG | GIINP | CAKDW | RASQN | AASSLQ | CQQSY | QVQLVQSGAEVKK | DIQMTQSPSSLSASV |
| | YHIH | SGGST | SSWYL | ISSSL | S (SEQ | TTPYT | PGASVKVSCKASG | GDRVTITCRASQNIS |
| | (SEQ | IYA | GPFDY | N | ID NO: | F | YTFTGYHIHWVRQ | SSLNWYQQKPGKAPK |
| | ID | (SEQ | W | (SEQ | 65) | (SEQ | APGQGLEWMGIIN | LLIYAASSLQSGVPS |
| | NO: | ID | (SEQ | ID | | ID | PSGGSTIYAQKFQ | RFSGSGSGTDFTLTI |
| | 96) | NO: | ID | NO: | | NO: | GRVTMTRDTSTST | SSLQPEDFATYYCQQ |
| | | 97) | NO: | 99) | | 100) | VYMELSSLRSEDT | SYTTPYTFGQGTKVE |
| | | | 98) | | | | AVYYCAKDWSSWY | IK (SEQ ID NO: |
| | | | | | | | LGPFDYWGQGTLV | 425) |
| | | | | | | | TVSS (SEQ ID | |
| | | | | | | | NO: 424) | |
| 9. | YTFTS | GIINH | CARPY | RASQS | STLQS | QQSYS | QVQLVQSGAEVKK | DIQMTQSPSSLSASV |
| | YYMH | SGGST | SGWYF | ISSSL | (SEQ | TPLT | PGASVKVSCKASG | GDRVTITCRASQSIS |
| | (SEQ | SYA | AFDIW | N | ID NO: | (SEQ | YTFTSYYMHWVRQ | SSLNWYQQKPGKAPK |
| | ID | (SEQ | (SEQ | (SEQ | 420) | ID | APGQGLEWMGIIN | LLIYAASTLQSGVPS |
| | NO: | ID | ID | ID | | NO: | HSGGSTSYAQKFQ | RFSGSGSGTDFTLTI |
| | 215) | NO: | NO: | NO: | | 429) | GRVTMTRDTSTST | SSLQPEDFATYYCQQ |
| | | 426) | 427) | 428) | | | VYMELSSLRSEDT | SYSTPLTFGQGTKVE |
| | | | | | | | AVYYCARPYSGWY | IK (SEQ ID NO: |
| | | | | | | | FAFDIWGQGTLVT | 431) |
| | | | | | | | VSS (SEQ ID | |
| | | | | | | | NO: 430) | |
| 10. | FMFGD | SAISG | CAKDL | RASQG | DASSLE | CQQTH | EVQLLESGGGLVQ | DIQMTQSPSSLSASV |
| | YAMH | SGGST | VVAGI | ISNNL | S (SEQ | SFPST | PGGSLRLSCAASG | GDRVTITCRASQGIS |
| | (SEQ | YYA | WYFDL | N | ID NO: | F | FMFGDYAMHWVRQ | NNLNWYQQKPGKAPK |
| | ID | (SEQ | W | (SEQ | 106) | (SEQ | APGKGLEWVSAIS | LLIYDASSLESGVPS |
| | NO: | ID | (SEQ | ID | | ID | GSGGSTYYADSVK | RFSGSGSGTDFTLTI |
| | 102) | NO: | ID | NO: | | NO: | GRFTISRDNSKNT | SSLQPEDFATYYCQQ |
| | | 103) | NO: | 105) | | 107) | LYLQMNSLRAEDT | THSFPSTFGQGTKLE |
| | | | 104) | | | | AVYYCAKDLVVAG | IK (SEQ ID NO: |
| | | | | | | | IWYFDLWGRGTLV | 433) |
| | | | | | | | TVSS (SEQ ID | |
| | | | | | | | NO: 432) | |
| 11. | FTFSD | SVIGE | CAADP | RASQG | AASTLQ | CQQSY | EVQLLESGGGLVQ | DIQMTQSPSSLSASV |
| | YYMN | SGGST | VSRWP | ISSSL | S (SEQ | STPWT | PGGSLRLSCAASG | GDRVTITCRASQGIS |
| | (SEQ | YYA | KHGGG | A | ID NO: | F | FTFSDYYMNWVRQ | SSLAWYQQKPGKAPK |
| | ID | (SEQ | DYW | (SEQ | 113) | (SEQ | APGKGLEWVSVIG | LLIYAASTLQSGVPS |
| | NO: | ID | (SEQ | ID | | ID | ESGGSTYYADSVK | RFSGSGSGTDFTLTI |
| | 109) | NO: | ID | NO: | | NO: | GRFTISRDNSKNT | SSLQPEDFATYYCQQ |
| | | 110) | NO: | 112) | | 114) | LYLQMNSLRAEDT | SYSTPWTFGQGTKVE |
| | | | 111) | | | | AVYYCAADPVSRW | IK (SEQ ID NO: |
| | | | | | | | PKHGGGDYWGQGT | 435) |
| | | | | | | | LVTVSS (SEQ | |
| | | | | | | | ID NO: 434) | |
| 12. | YTLTT | GWINP | CAKGD | RASDN | AASSLQ | CQQGY | QVQLVQSGAEVKK | DIQMTQSPSSLSASV |
| | WYMY | NRGAT | LWGAM | IGSWL | S (SEQ | STPPT | PGASVKVSCKASG | GDRVTITCRASDNIG |
| | (SEQ | NYA | DVW | A | ID NO: | F | YTLTTWYMYWVRQ | SWLAWYQQKPGKAPK |
| | ID | (SEQ | (SEQ | (SEQ | 65) | (SEQ | APGQGLEWMGWIN | LLIYAASSLQSGVPS |
| | NO: | ID | ID | ID | | ID | PNRGATNYAQKFQ | RFSGSGSGTDFTLTI |
| | 116) | NO: | NO: | NO: | | NO: | GRVTMTRDTSTST | SSLQPEDFATYYCQQ |
| | | 117) | 118) | 119) | | 120) | VYMELSSLRSEDT | GYSTPPTFGQGTKVE |
| | | | | | | | AVYYCAKGDLWGA | IK (SEQ ID NO: |
| | | | | | | | MDVWGQGTLVTVS | 437) |
| | | | | | | | S (SEQ ID NO: | |
| | | | | | | | 436) | |
| 13. | YTFTT | GGFDP | CARHA | RASES | AASTLQ | CQQSY | QVQLVQSGAEVKK | DIQMTQSPSSLSASV |
| | YYMH | EDGET | VAGAV | ISNWL | S (SEQ | SVPFT | PGASVKVSCKASG | GDRVTITCRASESIS |
| | (SEQ | IYA | GAGYY | A | ID NO: | F | YTFTTYYMHWVRQ | NWLAWYQQKPGKAPK |
| | ID | (SEQ | YYGMD | (SEQ | 113) | (SEQ | APGQGLEWMGGFD | LLIYAASTLQSGVPS |
| | NO: | ID | VW | ID | | ID | PEDGETIYAQKFQ | RFSGSGSGTDFTLTI |
| | 122) | NO: | (SEQ | NO: | | NO: | GRVTMTRDTSTST | SSLQPEDFATYYCQQ |
| | | 123) | ID | 125) | | 126) | VYMELSSLRSEDT | SYSVPFTFGPGTKVD |
| | | | NO: | | | | AVYYCARHAVAGA | IK (SEQ ID NO: |
| | | | 124) | | | | VGAGYYYYGMDVW | 439) |
| | | | | | | | GQGTMVTVSS | |
| | | | | | | | (SEQ ID NO: | |
| | | | | | | | 438) | |
| 14. | YTFTN | GGIIP | CAKGQ | QANQD | SKLEA | QQSSE | QVQLVQSGAEVKK | DIQMTQSPSSLSASV |
| | YYMH | IVDGV | FTGNY | ISNYL | (SEQ | IPYS | PGSSVKVSCKASG | GDRVTITCQANQDIS |
| | (SEQ | KYA | YYGMD | N | ID NO: | (SEQ | YTFTNYYMHWVRQ | NYLNWYQQKPGKAPK |
| | ID | (SEQ | YW | (SEQ | 442) | ID | APGQGLEWMGGII | LLIYRASKLEAGVPS |
| | NO: | ID | (SEQ | ID | | NO: | PIVDGVKYAQKFQ | RFSGSGSGTDFTLTI |
| | 148) | NO: | ID | NO: | | 443) | GRVTITADESTST | SSLQPEDFATYYCQQ |
| | | 440) | NO: | 151) | | | AYMELSSLRSEDT | SSEIPYSFGQGTKVE |
| | | | 441) | | | | AVYYCAKGQFTGN | IK (SEQ ID NO: |
| | | | | | | | YYYGMDYWGQGTL | 445) |
| | | | | | | | VTVSS (SEQ ID | |
| | | | | | | | NO: 444) | |
| 15. | YTFTG | GWIGP | CARDL | RSSQS | SSSNRA | CMQAL | QVQLVQSGAEVKK | DIVMTQSPLSLPVTP |
| | YYMH | NSGDT | DHNWY | LLHSN | P (SEQ | HIPLT | PGASVKVSCKASG | GEPASISCRSSQSLL |
| | (SEQ | NYA | FDLW | GYNYL | ID NO: | F | YTFTGYYMHWVRQ | HSNGYNYLDWYLQKP |
| | ID | (SEQ | (SEQ | D | 132) | (SEQ | APGQGLEWMGWIG | GQSPQLLIYSSSNRA |
| | NO: | ID | ID | (SEQ | | ID | PNSGDTNYAQKFQ | PGVPDRFSGSGSGTD |
| | 128) | NO: | NO: | ID | | NO: | GRVTMTRDTSTST | FTLKISRVEAEDVGV |
| | | 129) | 130) | NO: | | 133) | VYMELSSLRSEDT | YYCMQALHIPLTFGG |
| | | | | 131) | | | AVYYCARDLDHNW | GTKVEIK (SEQ ID |
| | | | | | | | YFDLWGRGTLVTV | NO: 447) |
| | | | | | | | SS (SEQ ID | |
| | | | | | | | NO: 446) | |
| 16. | FTFDD | SYIDA | CAKDQ | QASQD | KASTLE | CQQSY | EVQLLESGGGLVQ | DIQMTQSPSSLSASV |
| | YAMH | SGTTI | AAAGY | ISNYL | S (SEQ | STPIT | PGGSLRLSCAASG | GDRVTITCQASQDIS |
| | (SEQ | YYA | WYFDL | N | ID NO: | F | FTFDDYAMHWVRQ | NYLNWYQQKPGKAPK |
| | ID | (SEQ | W | (SEQ | 139) | (SEQ | APGKGLEWVSYID | LLIYKASTLESGVPS |
| | NO: | ID | (SEQ | ID | | ID | ASGTTIYYADSVK | RFSGSGSGTDFTLTI |
| | 135) | NO: | ID | NO: | | NO: | GRFTISRDNSKNT | SSLQPEDFATYYCQQ |
| | | 136) | NO: | 138) | | 140) | LYLQMNSLRAEDT | SYSTPITFGQGTRLE |
| | | | 137) | | | | AVYYCAKDQAAAG | IK (SEQ ID NO: |
| | | | | | | | YWYFDLWGRGTLV | |
| | | | | | | | TVSS (SEQ ID | 449) |
| | | | | | | | NO: 448) | |
| 17. | YTFTD | GGIVP | CAKDE | RSSQS | SAYNRA | CMQAL | QVQLVQSGAEVKK | DIVMTQSPLSLPVTP |
| | YHIH | RSGST | SSGWY | LLHSN | S (SEQ | QTPLT | PGSSVKVSCKASG | GEPASISCRSSQSLL |
| | (SEQ | TYA | YFDYW | GYNYL | ID NO: | F | YTFTDYHIHWVRQ | HSNGYNYLDWYLQKP |
| | ID | (SEQ | (SEQ | D | 145) | (SEQ | APGQGLEWMGGIV | GQSPQLLIYSAYNRA |
| | NO: | ID | ID | (SEQ | | ID | PRSGSTTYAQKFQ | SGVPDRFSGSGSGTD |
| | 142) | NO: | NO: | ID | | NO: | GRVTITADESTST | FTLKISRVEAEDVGV |
| | | 143) | 144) | NO: | | 146) | AYMELSSLRSEDT | YYCMQALQTPLTFGQ |
| | | | | 131) | | | AVYYCAKDESSGW | GTKVEIK (SEQ ID |
| | | | | | | | YYFDYWGQGTLVT | NO: 451) |
| | | | | | | | VSS (SEQ ID | |
| | | | | | | | NO: 450) | |
| 18. | YTFTN | GGIIP | CAKGR | QANQD | RASKLE | CQQSS | QVQLVQSGAEVKK | DIQMTQSPSSLSASV |
| | YYMH | IVDRV | YTVNY | ISNYL | A (SEQ | EIPYS | PGSSVKVSCKASG | GDRVTITCQANQDIS |
| | (SEQ | KYA | YYGMD | N | ID NO: | F | YTFTNYYMHWVRQ | NYLNWYQQKPGKAPK |
| | ID | (SEQ | VW | (SEQ | 152) | (SEQ | APGQGLEWMGGII | LLIYRASKLEAGVPS |
| | NO: | ID | (SEQ | ID | | ID | PIVDRVKYAQKFQ | RFSGSGSGTDFTLTI |
| | 148) | NO: | ID | NO: | | NO: | GRVTITADESTST | SSLQPEDFATYYCQQ |
| | | 149) | NO: | 151) | | 153) | AYMELSSLRSEDT | SSEIPYSFGQGTKLE |
| | | | 150) | | | | AVYYCAKGRYTVN | IK (SEQ ID NO: |
| | | | | | | | YYYGMDVWGQGTT | 453) |
| | | | | | | | VTVSS (SEQ ID | |
| | | | | | | | NO: 452) | |
| 19. | FTFED | SYLNS | CAKDY | RASQS | DASNLE | CQQSY | EVQLLESGGGLVQ | DIQMTQSPSSLSASV |
| | YAMH | DGGST | CTNGV | ISTYL | T (SEQ | TIPIT | PGGSLRLSCAASG | GDRVTITCRASQSIS |
| | (SEQ | SYA | CAFDY | N | ID NO: | F | FTFEDYAMHWVRQ | TYLNWYQQKPGKAPK |
| | ID | (SEQ | W | (SEQ | 159) | (SEQ | APGKGLEWVSYLN | LLIYDASNLETGVPS |
| | NO: | ID | (SEQ | ID | | ID | SDGGSTSYADSVK | RFSGSGSGTDFTLTI |
| | 155) | NO: | ID | NO: | | NO: | GRFTISRDNSKNT | SSLQPEDFATYYCQQ |
| | | 156) | NO: | 158) | | 160) | LYLQMNSLRAEDT | SYTIPITFGQGTRLE |
| | | | 157) | | | | AVYYCAKDYCTNG | IK (SEQ ID NO: |
| | | | | | | | VCAFDYWGQGTLV | 455) |
| | | | | | | | TVSS (SEQ ID | |
| | | | | | | | NO: 454) | |
| 20. | FTFSD | SAISG | CVSDI | RASQS | AASRLE | CQQAN | EVQLLESGGGLVQ | DIQMTQSPSSLSASV |
| | SAMH | SGSTI | AVAGH | ISTFL | G (SEQ | SFPLT | PGGSLRLSCAASG | GDRVTITCRASQSIS |
| | (SEQ | YYA | WYFDL | N | ID NO: | F | FTFSDSAMHWVRQ | TFLNWYQQKPGKAPK |
| | ID | (SEQ | W | (SEQ | 166) | (SEQ | APGKGLEWVSAIS | LLIYAASRLEGGVPS |
| | NO: | ID | (SEQ | ID | | ID | GSGSTIYYADSVK | RFSGSGSGTDFTLTI |
| | 162) | NO: | ID | NO: | | NO: | GRFTISRDNSKNT | SSLQPEDFATYYCQQ |
| | | 163) | NO: | 165) | | 167) | LYLQMNSLRAEDT | ANSFPLTFGPGTKVD |
| | | | 164) | | | | AVYYCVSDIAVAG | IK (SEQ ID NO: |
| | | | | | | | HWYFDLWGRGTLV | 457) |
| | | | | | | | TVSS (SEQ ID | |
| | | | | | | | NO: 456) | |
| 21. | FTFSS | SYISG | CARAN | RASQS | AASSLQ | CQQSY | EVQLVESGGGLVK | DIQMTQSPSSLSASV |
| | YWMS | DSGYT | SSGWY | ISSYL | S (SEQ | STPLT | PGGSLRLSCAASG | GDRVTITCRASQSIS |
| | (SEQ | NYA | DWYFD | N | ID NO: | F | FTFSSYWMSWVRQ | SYLNWYQQKPGKAPK |
| | ID | (SEQ | LW | (SEQ | 65) | (SEQ | APGKGLEWVSYIS | LLIYAASSLQSGVPS |
| | NO: | ID | (SEQ | ID | | ID | GDSGYTNYAAPVK | RFSGSGSGTDFTLTI |
| | 169) | NO: | ID | NO: | | NO: | GRFTISRDDSKNT | SSLQPEDFATYYCQQ |
| | | 170) | NO: | 172) | | 173) | LYLQMNSLKTEDT | SYSTPLTFGGGTKVE |
| | | | 171) | | | | AVYYCARANSSGW | IK (SEQ ID NO: |
| | | | | | | | YDWYFDLWGRGTL | 459) |
| | | | | | | | VTVSS (SEQ ID | |
| | | | | | | | NO: 458) | |
| 22. | FTFDD | SGISW | CAKDI | QASQD | DASNLE | CQQSY | EVQLLESGGGLVQ | DIQMTQSPSSLSASV |
| | YAMH | NSGSI | VAAGH | ISNYL | T (SEQ | STPLT | PGGSLRLSCAASG | GDRVTITCQASQDIS |
| | (SEQ | GYA | YYYGM | N | ID NO: | F | FTFDDYAMHWVRQ | NYLNWYQQKPGKAPK |
| | ID | (SEQ | DVW | (SEQ | 159) | (SEQ | APGKGLEWVSGIS | LLIYDASNLETGVPS |
| | NO: | ID | (SEQ | ID | | ID | WNSGSIGYADSVK | RFSGSGSGTDFTLTI |
| | 135) | NO: | ID | NO: | | NO: | GRFTISRDNSKNT | SSLQPEDFATYYCQQ |
| | | 175) | NO: | 138) | | 173) | LYLQMNSLRAEDT | SYSTPLTFGGGTKVE |
| | | | 176) | | | | AVYYCAKDIVAAG | IK (SEQ ID NO: |
| | | | | | | | HYYYGMDVWGQGT | 461) |
| | | | | | | | TVTVSS (SEQ | |
| | | | | | | | ID NO: 460) | |
| 23. | FTFDD | SYIDT | CARDE | QAGQD | DASNLE | CQQTY | EVQLLESGGGLVQ | DIQMTQSPSSLSASV |
| | YAMH | SSSHL | AAAGY | ISNYL | T (SEQ | STPIT | PGGSLRLSCAASG | GDRVTITCQAGQDIS |
| | (SEQ | YYA | YGMDV | N | ID NO: | F | FTFDDYAMHWVRQ | NYLNWYQQKPGKAPK |
| | ID | (SEQ | W | (SEQ | 159) | (SEQ | APGKGLEWVSYID | LLIYDASNLETGVPS |
| | NO: | ID | (SEQ | ID | | ID | TSSSHLYYADSVK | RFSGSGSGTDFTLTI |
| | 135) | NO: | ID | NO: | | NO: | GRFTISRDNSKNT | SSLQPEDFATYYCQQ |
| | | 178) | NO: | 180) | | 181) | LYLQMNSLRAEDT | TYSTPITFGQGTKLE |
| | | | 179) | | | | AVYYCARDEAAAG | IK (SEQ ID NO: |
| | | | | | | | YYGMDVWGQGTTV | 463) |
| | | | | | | | TVSS (SEQ ID | |
| | | | | | | | NO: 462) | |
| 24. | FTFSS | SRISS | CARGT | RASQS | SNLQS | QQSYS | EVQLVESGGGLVK | DIQMTQSPSSLSASV |
| | YWMS | DGRIT | SYCTG | IGRNL | (SEQ | IPLT | PGGSLRLSCAASG | GDRVTITCRASQSIG |
| | (SEQ | TYA | GVCDI | N | ID NO: | (SEQ | FTFSSYWMSWVRQ | RNLNWYQQKPGKAPK |
| | ID | (SEQ | DYW | (SEQ | 467) | ID | APGKGLEWVSRIS | LLIYSASNLQSGVPS |
| | NO: | ID | (SEQ | ID | | NO: | SDGRITTYAAPVK | RFSGSGSGTDFTLTI |
| | 169) | NO: | ID | NO: | | 468) | GRFTISRDDSKNT | SSLQPEDFATYYCQQ |
| | | 464) | NO: | 466) | | | LYLQMNSLKTEDT | SYSIPLTFGPGTKVD |
| | | | 465) | | | | AVYYCARGTSYCT | IK (SEQ ID NO: |
| | | | | | | | GGVCDIDYWGQGT | 470) |
| | | | | | | | LVTVSS (SEQ | |
| | | | | | | | ID NO: 469) | |
| 25. | FTFSN | STIVG | CARDN | RASQD | AASSLQ | CQQSY | EVQLLESGGGLVQ | DIQMTQSPSSLSASV |
| | AWMS | NGGAT | PLRWQ | ISNYL | S (SEQ | SIPPT | PGGSLRLSCAASG | GDRVTITCRASQDIS |
| | (SEQ | YYA | GMDVW | N | ID NO: | F | FTFSNAWMSWVRQ | NYLNWYQQKPGKAPK |
| | ID | (SEQ | (SEQ | (SEQ | 65) | (SEQ | APGKGLEWVSTIV | LLIYAASSLQSGVPS |
| | NO: | ID | ID | ID | | ID | GNGGATYYADSVK | RFSGSGSGTDFTLTI |
| | 183) | NO: | NO: | NO: | | NO: | GRFTISRDNSKNT | SSLQPEDFATYYCQQ |
| | | 184) | 185) | 186) | | 187) | LYLQMNSLRAEDT | SYSIPPTFGPGTKVD |
| | | | | | | | AVYYCARDNPLRW | IK (SEQ ID NO: |
| | | | | | | | QGMDVWGQGTLVT | 472) |
| | | | | | | | VSS (SEQ ID | |
| | | | | | | | NO: 471) | |
| 26. | FTFSS | SYISS | CARAN | RASQS | SGLQS | QQSYS | EVQLLESGGGLVQ | DIQMTQSPSSLSASV |
| | YAMS | SSTYT | SSSWY | ISSYL | (SEQ | TPLT | PGGSLRLSCAASG | GDRVTITCRASQSIS |
| | (SEQ | NYA | DWYFD | N | ID NO: | (SEQ | FTFSSYAMSWVRQ | SYLNWYQQKPGKAPK |
| | ID | (SEQ | LW | (SEQ | 474) | ID | APGKGLEWVSYIS | LLIYAASGLQSGVPS |
| | NO: | ID | (SEQ | ID | | NO: | SSSTYTNYADSVK | RFSGSGSGTDFTLTI |
| | 473) | NO: | ID | NO: | | 429) | GRFTISRDNSKNT | SSLQPEDFATYYCQQ |
| | | 190) | NO: | 172) | | | LYLQMNSLRAEDT | SYSTPLTFGGGTKVE |
| | | | 191) | | | | AVYYCARANSSSW | IK (SEQ ID NO: |
| | | | | | | | YDWYFDLWGQGTL | 476) |
| | | | | | | | VTVSS (SEQ ID | |
| | | | | | | | NO: 475) | |
| 27. | FTFSS | SYISS | CARAN | RASQS | SGLQS | QQSYS | EVQLLESGGGLVQ | DIQMTQSPSSLSASV |
| | YQMS | SSTYT | SSSWY | ISSYL | (SEQ | TPLT | PGGSLRLSCAASG | GDRVTITCRASQSIS |
| | (SEQ | NYA | DWYFD | N | ID NO: | (SEQ | FTFSSYQMSWVRQ | SYLNWYQQKPGKAPK |
| | ID | (SEQ | LW | (SEQ | 474) | ID | APGKGLEWVSYIS | LLIYAASGLQSGVPS |
| | NO: | ID | (SEQ | ID | | NO: | SSSTYTNYADSVK | RFSGSGSGTDFTLTI |
| | 189) | NO: | ID | NO: | | 429) | GRFTISRDNSKNT | SSLQPEDFATYYCQQ |
| | | 190) | NO: | 172) | | | LYLQMNSLRAEDT | SYSTPLTFGGGTKVE |
| | | | 191) | | | | AVYYCARANSSSW | IK (SEQ ID NO: |
| | | | | | | | YDWYFDLWGQGTL | 476) |
| | | | | | | | VTVSS (SEQ ID | |
| | | | | | | | NO: 477) | |
| 28. | FTFSS | SYISS | CARAN | RASQS | SSLQS | QQSYS | EVQLLESGGGLVQ | DIQMTQSPSSLSASV |
| | YAMS | SSTYT | SSSWY | ISSYL | (SEQ | TPLT | PGGSLRLSCAASG | GDRVTITCRASQSIS |
| | (SEQ | NYA | DWYFD | N | ID NO: | (SEQ | FTFSSYAMSWVRQ | SYLNWYQQKPGKAPK |
| | ID | (SEQ | LW | (SEQ | 362) | ID | APGKGLEWVSYIS | LLIYAASSLQSGVPS |
| | NO: | ID | (SEQ | ID | | NO: | SSSTYTNYADSVK | RFSGSGSGTDFTLTI |
| | 473) | NO: | ID | NO: | | 429) | GRFTISRDNSKNT | SSLQPEDFATYYCQQ |
| | | 190) | NO: | 172) | | | LYLQMNSLRAEDT | SYSTPLTFGGGTKVE |
| | | | 191) | | | | AVYYCARANSSSW | IK (SEQ ID NO: |
| | | | | | | | YDWYFDLWGQGTL | 459) |
| | | | | | | | VTVSS (SEQ ID | |
| | | | | | | | NO: 475) | |
| 29. | FTFSS | SYISS | CARAN | RASQS | AASSLQ | CQQSY | EVQLLESGGGLVQ | DIQMTQSPSSLSASV |
| | YQMS | SSTYT | SSSWY | ISSYL | S (SEQ | STPLT | PGGSLRLSCAASG | GDRVTITCRASQSIS |
| | (SEQ | NYA | DWYFD | N | ID NO: | F | FTFSSYQMSWVRQ | SYLNWYQQKPGKAPK |
| | ID | (SEQ | LW | (SEQ | 65) | (SEQ | APGKGLEWVSYIS | LLIYAASSLQSGVPS |
| | NO: | ID | (SEQ | ID | | ID | SSSTYTNYADSVK | RFSGSGSGTDFTLTI |
| | 189) | NO: | ID | NO: | | NO: | GRFTISRDNSKNT | SSLQPEDFATYYCQQ |
| | | 190) | NO: | 172) | | 173) | LYLQMNSLRAEDT | SYSTPLTFGGGTKVE |
| | | | 191) | | | | AVYYCARANSSSW | IK (SEQ ID NO: |
| | | | | | | | YDWYFDLWGQGTL | 459) |
| | | | | | | | VTVSS (SEQ ID | |
| | | | | | | | NO: 477) | |
| 30. | FTFSS | SGISG | CATSQ | RASQS | AASNLQ | CQQSY | EVQLLESGGGLVQ | DIQMTQSPSSLSASV |
| | YAMH | SGGSA | APVDY | ISSWL | R (SEQ | SIPIT | PGGSLRLSCAASG | GDRVTITCRASQSIS |
| | (SEQ | YYA | YYYGM | A | ID NO: | F | FTFSSYAMHWVRQ | SWLAWYQQKPGKAPK |
| | ID | (SEQ | DVW | (SEQ | 197) | (SEQ | APGKGLEWVSGIS | LLIYAASNLQRGVPS |
| | NO: | ID | SEQ | ID | | ID | GSGGSAYYADSVK | RFSGSGSGTDFTLTI |
| | 193) | NO: | ID | NO: | | NO: | GRFTISRDNSKNT | SSLQPEDFATYYCQQ |
| | | 194) | NO: | 196) | | 198) | LYLQMNSLRAEDT | SYSIPITFGQGTKVE |
| | | | 195) | | | | AVYYCATSQAPVD | IK (SEQ ID NO: |
| | | | | | | | YYYYGMDVWGQGT | 479) |
| | | | | | | | TVTVSS (SEQ | |
| | | | | | | | ID NO: 478) | |
| 31. | FTFSS | SYISG | CARVG | RASQS | AASSLQ | CQQSY | EVQLVESGGGLVK | DIQMTQSPSSLSASV |
| | YWMS | SSSYT | SSGWY | ISSYL | S (SEQ | STPLT | PGGSLRLSCAASG | GDRVTITCRASQSIS |
| | (SEQ | NYA | DWYFD | N | ID NO: | F | FTFSSYWMSWVRQ | SYLNWYQQKPGKAPK |
| | ID | (SEQ | LW | (SEQ | 65) | (SEQ | APGKGLEWVSYIS | LLIYAASSLQSGVPS |
| | NO: | ID | (SEQ | ID | | ID | GSSSYTNYAAPVK | RFSGSGSGTDFTLTI |
| | 169) | NO: | ID | NO: | | NO: | GRFTISRDDSKNT | SSLQPEDFATYYCQQ |
| | | 200) | NO: | 172) | | 173) | LYLQMNSLKTEDT | SYSTPLTFGQGTKVE |
| | | | 201) | | | | AVYYCARVGSSGW | IK (SEQ ID NO: |
| | | | | | | | YDWYFDLWGRGTL | 481) |
| | | | | | | | VTVSS (SEQ ID | |
| | | | | | | | NO: 480) | |
| 32. | YTLTT | GWINP | CAKGD | RASDN | AASSLQ | CQQGY | QVQLVQSGAEVKK | DIQMTQSPSSLSASV |
| | WYMY | NRGAT | LWGAM | IGSWL | S (SEQ | STPPT | PGASVKVSCKASG | GDRVTITCRASDNIG |
| | (SEQ | NYA | DVW | A | ID NO: | F | YTLTTWYMYWVRQ | SWLAWYQQKPGKAPK |
| | ID | (SEQ | (SEQ | (SEQ | 65) | (SEQ | APGQGLEWMGWIN | LLIYAASSLQSGVPS |
| | NO: | ID | ID | ID | | ID | PNRGATNYAQKFQ | RFSGSGSGTDFTLTI |
| | 116) | NO: | NO: | NO: | | NO: | GRVTMTRDTSTST | SSLQPEDFATYYCQQ |
| | | 117) | 118) | 119) | | 120) | VYMELSSLRSEDT | GYSTPPTFGQGTKVE |
| | | | | | | | AVYYCAKGDLWGA | IK (SEQ ID NO: |
| | | | | | | | MDVWGQGTLVTVS | 437) |
| | | | | | | | S (SEQ ID NO: | |
| | | | | | | | 436) | |
| 33. | YTLTT | GWINP | CAKGD | RASDN | AASSLQ | CQQGY | QVQLVQSGAEVKK | DIQMTQSPSSLSASV |
| | WYMY | NRGAT | LWGAM | IGSWL | S (SEQ | STPPT | PGASVKVSCKASG | GDRVTITCRASDNIG |
| | (SEQ | NYA | DVW | A | ID NO: | F | YTLTTWYMYWVRQ | SWLAWYQQKPGKAPK |
| | ID | (SEQ | (SEQ | (SEQ | 65) | (SEQ | APGQGLEWMGWIN | LLIYAASSLQSGVPS |
| | NO: | ID | ID | ID | | ID | PNRGATNYAQKFQ | RFSGSGSGTDFTLTI |
| | 116) | NO: | NO: | NO: | | NO: | GRVTMTRDTSTST | SSLQPEDFATYYCQQ |
| | | 117) | 118) | 119) | | 120) | VYMELSSLRSEDT | GYSTPPTFGQGTKVE |
| | | | | | | | AVYYCAKGDLWGA | IK (SEQ ID NO: |
| | | | | | | | MDVWGQGTTVTVS | 437) |
| | | | | | | | S (SEQ ID NO: | |
| | | | | | | | 482) | |
| 34. | YTFTG | GWMNP | CARDP | RASQS | AASSLQ | CQQSY | QVQLVQSGAEVKK | DIQMTQSPSSLSASV |
| | YYIH | NSGNT | GFLGY | ISSYL | S (SEQ | TAPYT | PGASVKVSCKASG | GDRVTITCRASQSIS |
| | (SEQ | GYA | CSGGS | H | ID NO: | F | YTFTGYYIHWVRQ | SYLHWYQQKPGKAPK |
| | ID | (SEQ | CYDGW | (SEQ | 65) | (SEQ | APGQGLEWMGWMN | LLIYAASSLQSGVPS |
| | NO: | ID | FDPW | ID | | ID | PNSGNTGYAQKFQ | RFSGSGSGTDFTLTI |
| | 204) | NO: | (SEQ | NO: | | NO: | GRVTMTRDTSTST | SSLQPEDFATYYCQQ |
| | | 205) | ID | 207) | | 208) | VYMELSSLRSEDT | SYTAPYTFGQGTKLE |
| | | | NO: | | | | AVYYCARDPGFLG | IK (SEQ ID NO: |
| | | | 206) | | | | YCSGGSCYDGWFD | 484) |
| | | | | | | | PWGQGTLVTVSS | |
| | | | | | | | (SEQ ID NO: | |
| | | | | | | | 483) | |
| 35. | YTFTG | GWMNP | CARDP | RASQS | AASSLQ | CQQSY | QVQLVQSGAEVKK | DIQMTQSPSSLSASV |
| | YYIH | NSGNT | GFLGY | ISSYL | S (SEQ | TAPYT | PGASVKVSCKASG | GDRVTITCRASQSIS |
| | (SEQ | GYA | SSGGS | H | ID NO: | F | YTFTGYYIHWVRQ | SYLHWYQQKPGKAPK |
| | ID | (SEQ | CYDGW | (SEQ | 65) | (SEQ | APGQGLEWMGWMN | LLIYAASSLQSGVPS |
| | NO: | ID | FDPW | ID | | ID | PNSGNTGYAQKFQ | RFSGSGSGTDFTLTI |
| | 204) | NO: | (SEQ | NO: | | NO: | GRVTMTRDTSTST | SSLQPEDFATYYCQQ |
| | | 205) | ID | 207) | | 208) | VYMELSSLRSEDT | SYTAPYTFGQGTKLE |
| | | | NO: | | | | AVYYCARDPGELG | IK (SEQ ID NO: |
| | | | 485) | | | | YSSGGSSYDGWFD | 484) |
| | | | | | | | PWGQGTLVTVSS | |
| | | | | | | | (SEQ ID NO: | |
| | | | | | | | 486) | |
| 36. | FTFDD | SAISG | CARDG | QASQD | SNLET | QQSYS | EVQLLESGGGLVQ | DIQMTQSPSSLSASV |
| | YALH | DGRST | TVNGA | ISKYL | (SEQ | IPFT | PGGSLRLSCAASG | GDRVTITCQASQDIS |
| | (SEQ | TYA | TGWFD | N | ID NO: | (SEQ | FTFDDYALHWVRQ | KYLNWYQQKPGKAPK |
| | ID | (SEQ | PW | (SEQ | 491) | ID | APGKGLEWVSAIS | LLIYDASNLETGVPS |
| | NO: | ID | (SEQ | ID | | NO: | GDGRSTTYADSVK | RFSGSGSGTDFTLTI |
| | 487) | NO: | ID | NO: | | 492) | GRFTISRDNSKNT | SSLQPEDFATYYCQQ |
| | | 488) | NO: | 490) | | | LYLQMNSLRAEDT | SYSIPFTFGPGTKVD |
| | | | 489) | | | | AVYYCARDGTVNG | IK (SEQ ID NO: |
| | | | | | | | ATGWFDPWGQGTL | 494) |
| | | | | | | | VTVSS (SEQ ID | |
| | | | | | | | NO: 493) | |
| 37. | FTFSD | SAISG | CARDG | RASQG | SNLET | QQSYS | EVQLLESGGGLVQ | DIQMTQSPSSLSASV |
| | YGMP | SGGST | GWQPA | ISNNL | (SEQ | TPLT | PGGSLRLSCAASG | GDRVTITCRASQGIS |
| | (SEQ | YYA | AILDY | N | ID NO: | (SEQ | FTFSDYGMPWVRQ | NNLNWYQQKPGKAPK |
| | ID | (SEQ | W | (SEQ | 491) | ID | APGKGLEWVSAIS | LLIYDASNLETGVPS |
| | NO: | ID | (SEQ | ID | | NO: | GSGGSTYYADSVK | RFSGSGSGTDFTLTI |
| | 495) | NO: | ID | NO: | | 429) | GRFTISRDNSKNT | SSLQPEDFATYYCQQ |
| | | 103) | NO: | 105) | | | LYLQMNSLRAEDT | SYSTPLTFGQGTKVE |
| | | | 296) | | | | AVYYCARDGGWQP | IK (SEQ ID NO: |
| | | | | | | | AAILDYWGQGTLV | 497) |
| | | | | | | | TVSS (SEQ ID | |
| | | | | | | | NO: 496) | |
| 38. | YTFTD | GWMNP | CAREG | RASQG | DASNLE | CQQSY | QVQLVQSGAEVKK | DIQMTQSPSSLSASV |
| | YFLH | TSGNT | EGSGF | INSWL | T (SEQ | STPLT | PGASVKVSCKASG | GDRVTITCRASQGIN |
| | (SEQ | GYA | DYW | A | ID NO: | F | YTFTDYFLHWVRQ | SWLAWYQQKPGKAPK |
| | ID | (SEQ | (SEQ | (SEQ | 159) | (SEQ | APGQGLEWMGWMN | LLIYDASNLETGVPS |
| | NO: | ID | ID | ID | | ID | PTSGNTGYAQKFQ | RFSGSGSGTDFTLTI |
| | 210) | NO: | NO: | NO: | | NO: | GRVTMTRDTSTST | SSLQPEDFATYYCQQ |
| | | 211) | 212) | 213) | | 173) | VYMELSSLRSEDT | SYSTPLTFGGGTKVE |
| | | | | | | | AVYYCAREGEGSG | IK (SEQ ID NO: |
| | | | | | | | FDYWGQGTLVTVS | 499) |
| | | | | | | | S (SEQ ID NO: | |
| | | | | | | | 498) | |
| 39. | YTFTS | AWMNP | CARDY | RASQG | AASSLQ | CQQSY | QVQLVQSGAEVKK | DIQMTQSPSSLSASV |
| | YYMH | NSGNT | DFWSG | ISNYL | S (SEQ | STPWT | PGASVKVSCKASG | GDRVTITCRASQGIS |
| | (SEQ | GYA | SLGYW | A | ID NO: | F | YTFTSYYMHWVRQ | NYLAWYQQKPGKAPK |
| | ID | (SEQ | (SEQ | (SEQ | 65) | (SEQ | APGQGLEWMAWMN | LLIYAASSLQSGVPS |
| | NO: | ID | ID | ID | | ID | PNSGNTGYAQKFQ | RFSGSGSGTDFTLTI |
| | 215) | NO: | NO: | NO: | | NO: | GRVTMTRDTSTST | SSLQPEDFATYYCQQ |
| | | 216) | 217) | 218) | | 114) | VYMELSSLRSEDT | SYSTPWTFGQGTKVE |
| | | | | | | | AVYYCARDYDFWS | IK (SEQ ID NO: |
| | | | | | | | GSLGYWGQGTLVT | 501) |
| | | | | | | | VSS (SEQ ID | |
| | | | | | | | NO: 500) | |
| 40. | YTLTT | GWINP | CAKGD | RASDN | AASSLQ | CQQGY | QVQLVQSGAEVKK | DIQMTQSPSSLSASV |
| | WYMY | NRGAT | LWGAM | IGSWL | S (SEQ | STPPT | PGASVKVSCKASG | GDRVTITCRASDNIG |
| | (SEQ | NYA | DVW | A | ID NO: | F | YTLTTWYMYWVRQ | SWLAWYQQKPGKAPK |
| | ID | (SEQ | (SEQ | (SEQ | 65) | (SEQ | APGQGLEWMGWIN | LLIYAASSLQSGVPS |
| | NO: | ID | ID | ID | | ID | PNRGATNYAQKFQ | RFSGSGSGTDFTLTI |
| | 116) | NO: | NO: | NO: | | NO: | GRVTMTRDTSTST | SSLQPEDFATYYCQQ |
| | | 117) | 118) | 119) | | 120) | VYMELSSLRSEDT | GYSTPPTFGQGTKVE |
| | | | | | | | AVYYCAKGDLWGA | IK (SEQ ID NO: |
| | | | | | | | MDVWGQGTLVTVS | 437) |
| | | | | | | | S (SEQ ID NO: | |
| | | | | | | | 436) | |
| 41. | YTFTS | GIINP | CARDT | RASQS | DASNLQ | CQQSY | QVQLVQSGAEVKK | DIQMTQSPSSLSASV |
| | YYMH | SGGST | GYSYG | IGRWL | S (SEQ | SIPIT | PGASVKVSCKASG | GDRVTITCRASQSIG |
| | (SEQ | SYA | RYYYY | A | ID NO: | F | YTFTSYYMHWVRQ | RWLAWYQQKPGKAPK |
| | ID | (SEQ | GMDVW | (SEQ | 222) | (SEQ | APGQGLEWMGIIN | LLIYDASNLQSGVPS |
| | NO: | ID | (SEQ | ID | | ID | PSGGSTSYAQKFQ | RFSGSGSGTDFTLTI |
| | 215) | NO: | ID | NO: | | NO: | GRVTMTRDTSTST | SSLQPEDFATYYCQQ |
| | | 69) | NO: | 221) | | 198) | VYMELSSLRSEDT | SYSIPITFGQGTKVE |
| | | | 220) | | | | AVYYCARDTGYSY | IK (SEQ ID NO: |
| | | | | | | | GRYYYYGMDVWGQ | 503) |
| | | | | | | | GTLVTVSS (SEQ | |
| | | | | | | | ID NO: 502) | |
| 42. | YTLTD | GIINP | CAREE | RASQG | AASSLQ | CQQSY | QVQLVQSGAEVKK | DIQMTQSPSSLSASV |
| | YYMH | SGGST | YSSSS | ISSWL | S (SEQ | STPLT | PGASVKVSCKASG | GDRVTITCRASQGIS |
| | (SEQ | SYA | GYFDY | A | ID NO: | F | YTLTDYYMHWVRQ | SWLAWYQQKPGKAPK |
| | ID | (SEQ | W | (SEQ | 65) | (SEQ | APGQGLEWMGIIN | LLIYAASSLQSGVPS |
| | NO: | ID | (SEQ | ID | | ID | PSGGSTSYAQKFQ | RFSGSGSGTDFTLTI |
| | 224) | NO: | ID | NO: | | NO: | GRVTMTRDTSTST | SSLQPEDFATYYCQQ |
| | | 69) | NO: | 226) | | 173) | VYMELSSLRSEDT | SYSTPLTFGQGTKVE |
| | | | 225) | | | | AVYYCAREEYSSS | IK (SEQ ID NO: |
| | | | | | | | SGYFDYWGQGTLV | 505) |
| | | | | | | | TVSS (SEQ ID | |
| | | | | | | | NO: 504) | |
| 43. | YTFTS | GWMHP | CARDT | RASQS | AASSLQ | CQQSY | QVQLVQSGAEVKK | DIQMTQSPSSLSASV |
| | YGIS | KSGDT | PYYYY | ISSWL | S (SEQ | SVPIT | PGASVKVSCKASG | GDRVTITCRASQSIS |
| | (SEQ | GLT | GMDVW | A | ID NO: | F | YTFTSYGISWVRQ | SWLAWYQQKPGKAPK |
| | ID | (SEQ | (SEQ | (SEQ | 65) | (SEQ | APGQGLEWMGWMH | LLIYAASSLQSGVPS |
| | NO: | ID | ID | ID | | ID | PKSGDTGLTQKFQ | RFSGSGSGTDFTLTI |
| | 228) | NO: | NO: | NO: | | NO: | GRVTMTRDTSTST | SSLQPEDFATYYCQQ |
| | | 229) | 230) | 196) | | 231) | VYMELSSLRSEDT | SYSVPITFGQGTKVE |
| | | | | | | | AVYYCARDTPYYY | IK (SEQ ID NO: |
| | | | | | | | YGMDVWGQGTTVT | 507) |
| | | | | | | | VSS (SEQ ID | |
| | | | | | | | NO: 506) | |
| 44. | FTFSS | SAISG | CAKER | QASQD | SSLQS | QQTYS | EVQLLESGGGLVQ | DIQMTQSPSSLSASV |
| | YAMS | SGGST | FIDYG | ISNYL | (SEQ | GWT | PGGSLRLSCAASG | GDRVTITCQASQDIS |
| | (SEQ | YYA | MDVW | N | ID NO: | (SEQ | FTFSSYAMSWVRQ | NYLNWYQQKPGKAPK |
| | ID | (SEQ | (SEQ | (SEQ | 362) | ID | APGKGLEWVSAIS | LLIYAASSLQSGVPS |
| | NO: | ID | ID | ID | | NO: | GSGGSTYYADSVK | RFSGSGSGTDFTLTI |
| | 473) | NO: | NO: | NO: | | 509) | GRFTISRDNSKNT | SSLQPEDFATYYCQQ |
| | | 103) | 508) | 138) | | | LYLQMNSLRAEDT | TYSGWTFGPGTKVDI |
| | | | | | | | AVYYCAKERFIDY | K (SEQ ID NO: |
| | | | | | | | GMDVWGQGTTVTV | 511) |
| | | | | | | | SS (SEQ ID | |
| | | | | | | | NO: 510) | |
| 45. | FTFGD | SYISG | CARDV | RASQS | AASSLQ | CQQSY | EVQLVESGGGLVK | DIQMTQSPSSLSASV |
| | YAMS | DIGYT | AATGN | ISSYL | S (SEQ | STPLT | PGGSLRLSCAASG | GDRVTITCRASQSIS |
| | (SEQ | NYA | WYFDL | N | ID NO: | F | FTFGDYAMSWVRQ | SYLNWYQQKPGKAPK |
| | ID | (SEQ | W | (SEQ | 65) | (SEQ | APGKGLEWVSYIS | LLIYAASSLQSGVPS |
| | NO: | ID | (SEQ | ID | | ID | GDIGYTNYAAPVK | RFSGSGSGTDFTLTI |
| | 233) | NO: | ID | NO: | | NO: | GRFTISRDDSKNT | SSLQPEDFATYYCQQ |
| | | 234) | NO: | 172) | | 173) | LYLQMNSLKTEDT | SYSTPLTFGGGTKVE |
| | | | 235) | | | | AVYYCARDVAATG | IK (SEQ ID NO: |
| | | | | | | | NWYFDLWGRGTLV | 459) |
| | | | | | | | TVSS (SEQ ID | |
| | | | | | | | NO: 512) | |
| 46. | FSFSS | SFITS | CARDR | RASQS | GASTRA | CQQYG | EVQLLESGGGLVQ | EIVMTQSPATLSVSP |
| | YTMN | SSRTI | RGDYG | VRNYL | T (SEQ | SSPLT | PGGSLRLSCAASG | GERATLSCRASQSVR |
| | (SEQ | YYA | DSWYF | A | ID NO: | F | FSFSSYTMNWVRQ | NYLAWYQQKPGQAPR |
| | ID | (SEQ | DLW | (SEQ | 241) | (SEQ | APGKGLEWVSFIT | LLIYGASTRATGIPA |
| | NO: | ID | (SEQ | ID | | ID | SSSRTIYYADSVK | RFSGSGSGTEFTLTI |
| | 237) | NO: | ID | NO: | | NO: | GRFTISRDNSKNT | SSLQSEDFAVYYCQQ |
| | | 238) | NO: | 240) | | 242) | LYLQMNSLRAEDT | YGSSPLTFGGGTKVE |
| | | | 239) | | | | AVYYCARDRRGDY | IK (SEQ ID NO: |
| | | | | | | | GDSWYFDLWGRGT | 514) |
| | | | | | | | LVTVSS (SEQ | |
| | | | | | | | ID NO: 513) | |
| 47. | YTFTG | GIINP | CARDT | RASQS | DASNLQ | CQQSY | QVQLVQSGAEVKK | DIQMTQSPSSLSASV |
| | HYMH | SGGST | GYSYG | IGRWL | S (SEQ | SIPIT | PGASVKVSCKASG | GDRVTITCRASQSIS |
| | (SEQ | SYA | RYYYY | A | ID NO: | F | YTFSKHFVHWVRQ | SWLAWYQQKPGKAPK |
| | ID | (SEQ | GMDVW | (SEQ | 222) | (SEQ | APGQGLEWMGWMN | LLIYAASTLQSGVPS |
| | NO: | ID | (SEQ | ID | | ID | PNSGNSGYAQKFQ | RFSGSGSGTDFTLTI |
| | 244) | NO: | ID | NO: | | NO: | GRVTMTRDTSTST | SSLQPEDFATYYCQQ |
| | | 69) | NO: | 221) | | 198) | VYMELSSLRSEDT | SYSTPWTFGQGTKVE |
| | | | 220) | | | | AVYYCARGEGGYY | IK (SEQ ID NO: |
| | | | | | | | YYGMDVWGQGTLV | 516) |
| | | | | | | | TVSS (SEQ ID | |
| | | | | | | | NO: 515) | |
| 48. | YTFSK | GWMNP | CARGE | RASQS | AASTLQ | CQQSY | EVQLLESGGGLVQ | DIQMTQSPSSLSASV |
| | HFVH | NSGNS | GGYYY | ISSWL | S (SEQ | STPWT | PGGSLRLSCAASG | GDRVTITCRASQPLS |
| | (SEQ | GYA | YGMDV | A | ID NO: | F | FTFGSYSMSWVRQ | NWLAWYQQKPGKAPK |
| | ID | (SEQ | W | (SEQ | 113) | (SEQ | APGKGLEWVSAIG | LLIYAASSLQSGVPS |
| | NO: | ID | (SEQ | ID | | ID | TGGGTYYADSVKG | RFSGSGSGTDFTLTI |
| | 246) | NO: | ID | NO: | | NO: | RFTISRDNSKNTL | SSLQPEDFATYYCQQ |
| | | 247) | NO: | 196) | | 114) | YLQMNSLRAEDTA | AISFPLTFGGGTKVE |
| | | | 248) | | | | VYYCAKGTPYYYY | IK (SEQ ID NO: |
| | | | | | | | YGMDVWGQGTMVT | 518) |
| | | | | | | | VSS (SEQ ID | |
| | | | | | | | NO: 517) | |
| 49. | FTFGS | SAIGT | CAKGT | RASQP | AASSLQ | CQQAI | QVQLVQSGAEVKK | DIQMTQSPSSLSASV |
| | YSMS | GGGTY | PYYYY | LSNWL | S (SEQ | SFPLT | PGASVKVSCKASG | GDRVTITCQSSEDIS |
| | (SEQ | YA | YGMDV | A | ID NO: | F | YTFTSYYMHWVRQ | SSLNWYQQKPGKAPK |
| | ID | (SEQ | W | (SEQ | 65) | (SEQ | APGQGLEWMGWMN | LLIYAASSLQIGVPS |
| | NO: | ID | (SEQ | ID | | ID | PNSGNTGYAQKFQ | RFSGSGSGTDFTLTI |
| | 250) | NO: | ID | NO: | | NO: | GRVTMTRDTSTST | SSLQPEDFATYYCQQ |
| | | 251) | NO: | 253) | | 254) | VYMELSSLRSEDT | TYSTPYTFGQGTKVE |
| | | | 252) | | | | AVYYCARDLGYYD | IK (SEQ ID NO: |
| | | | | | | | SSGYFGAFDIWGQ | 520) |
| | | | | | | | GTTVTVSS (SEQ | |
| | | | | | | | ID NO: 519) | |
| 50. | YTFTS | GWMNP | CARDL | QSSED | AASSLQ | CQQTY | QVQLVQSGAEVKK | DIQMTQSPSSLSASV |
| | YYMH | NSGNT | GYYDS | ISSSL | I (SEQ | STPYT | PGASVKVSCKASG | GDRVTITCRASQGIG |
| | (SEQ | GYA | SGYFG | N | ID NO: | F | YTFTSYGISWVRQ | NWLAWYQQKPGKAPK |
| | ID | (SEQ | AFDIW | (SEQ | 258) | (SEQ | APGQGLEWMGIIN | LLIYAASNLETGVPS |
| | NO: | ID | (SEQ | ID | | ID | PRGGSTIFAQKFQ | RFSGSGSGTDFTLTI |
| | 215) | NO: | ID | NO: | | NO: | GRVTMTRDTSTST | SSLQPEDFATYYCQQ |
| | | 205) | NO: | 257) | | 259) | VYMELSSLRSEDT | IHSYPLTFGGGTKVE |
| | | | 256) | | | | AVYYCARGTRSSG | IK (SEQ ID NO: |
| | | | | | | | WYGWFDPWGQGTL | 522) |
| | | | | | | | VTVSS (SEQ ID | |
| | | | | | | | NO: 521) | |
| 51. | YTFTS | GIINP | CARGT | RASQG | AASNLE | CQQIH | EVQLVESGGGLVK | DIVMTQSPLSLPVTP |
| | YGIS | RGGST | RSSGW | IGNWL | T (SEQ | SYPLT | PGGSLRLSCAASG | GEPASISCRSSQSLL |
| | (SEQ | IFA | YGWFD | A | ID NO: | F | FIFQDSAIHWVRQ | HSNGYNYLDWYLQKP |
| | ID | (SEQ | PW | (SEQ | 264) | (SEQ | APGKGLEWVSAIG | GQSPQLLIYDASNLE |
| | NO: | ID | (SEQ | ID | | ID | TGGGTYYAAPVKG | TGVPDRFSGSGSGTD |
| | 228) | NO: | ID | NO: | | NO: | RFTISRDDSKNTL | FTLKISRVEAEDVGV |
| | | 261) | NO: | 263) | | 265) | YLQMNSLKTEDTA | YYCMQALQTPLTFGQ |
| | | | 262) | | | | VYYCARSYCSGGS | GTKVEIK (SEQ ID |
| | | | | | | | CSLGSWGQGTLVT | NO: 524) |
| | | | | | | | VSS (SEQ ID | |
| | | | | | | | NO: 523) | |
| 52. | FTFDD | SYISS | CAREI | RASQS | AASSLQ | CQQSY | EVQLLESGGGLVQ | DIQMTQSPSSLSASV |
| | YGMS | SSSYI | AAAGF | ISSYL | S (SEQ | STPLT | PGGSLRLSCAASG | GDRVTITCRASQSIS |
| | (SEQ | YYA | YGMDV | N | D NO: | F | FTFDDYGMSWVRQ | SYLNWYQQKPGKAPK |
| | ID | (SEQ | W | (SEQ | 65) | (SEQ | APGKGLEWVSYIS | LLIYAASSLQSGVPS |
| | NO: | ID | (SEQ | ID | | ID | SSSSYIYYADSVK | RFSGSGSGTDFTLTI |
| | 267) | NO: | ID | NO: | | NO: | GRFTISRDNSKNT | SSLQPEDFATYYCQQ |
| | | 268) | NO: | 172) | | 173) | LYLQMNSLRAEDT | SYSTPLTFGGGTKVE |
| | | | 269) | | | | AVYYCAREIAAAG | IK (SEQ ID NO: |
| | | | | | | | FYGMDVWGQGTTV | 459) |
| | | | | | | | TVSS (SEQ ID | |
| | | | | | | | NO: 525) | |
| 53. | YTFTS | GWMNP | CAREG | RASQG | SSLQS | QQSYS | QVQLVQSGAEVKK | DIQMTQSPSSLSASV |
| | YYMH | NSGNT | LGYCT | ISSWL | (SEQ | TPYT | PGASVKVSCKASG | GDRVTITCRASQGIS |
| | (SEQ | GYA | NGVCW | A | ID NO: | (SEQ | YTFTSYYMHWVRQ | SWLAWYQQKPGKAPK |
| | ID | (SEQ | NYYGM | (SEQ | 362) | ID | APGQGLEWMGWMN | LLIYGASSLQSGVPS |
| | NO: | ID | DVW | ID | | NO: | PNSGNTGYAQKFQ | RFSGSGSGTDFTLTI |
| | 215) | NO: | (SEQ | NO: | | 527) | GRVTMTRDTSTST | SSLQPEDFATYYCQQ |
| | | 205) | ID | 226) | | | VYMELSSLRSEDT | SYSTPYTFGQGTKVE |
| | | | NO: | | | | AVYYCAREGLGYC | IK (SEQ ID NO: |
| | | | 526) | | | | TNGVCWNYYGMDV | 529) |
| | | | | | | | WGQGTLVTVSS | |
| | | | | | | | (SEQ ID NO: | |
| | | | | | | | 528) | |
| 54. | GTLSR | GGIIP | CARDR | RASQS | GASTRA | CQQYG | QVQLVQSGAEVKK | EIVMTQSPATLSVSP |
| | YGVS | IFGTT | VYYDS | VSSSY | T (SEQ | SSPIT | PGSSVKVSCKASG | GERATLSCRASQSVS |
| | (SEQ | NYA | SGYPT | LA | ID NO: | F | GTLSRYGVSWVRQ | SSYLAWYQQKPGQAP |
| | ID | (SEQ | WYFDL | (SEQ | 241) | (SEQ | APGQGLEWMGGII | RLLIYGASTRATGIP |
| | NO: | ID | W | ID | | ID | PIFGTTNYAQKFQ | ARFSGSGSGTEFTLT |
| | 271) | NO: | (SEQ | NO: | | NO: | GRVTITADESTST | ISSLQSEDFAVYYCQ |
| | | 272) | ID | 274) | | 275) | AYMELSSLRSEDT | QYGSSPITFGQGTKV |
| | | | NO: | | | | AVYYCARDRVYYD | EIK (SEQ ID NO: |
| | | | 273) | | | | SSGYPTWYFDLWG | 531) |
| | | | | | | | RGTLVTVSS | |
| | | | | | | | (SEQ ID NO: | |
| | | | | | | | 530) | |
| 55. | FTFDD | SGISG | CARDA | QASQD | KASTLE | CQQAN | EVQLLESGGGLVQ | DIQMTQSPSSLSASV |
| | FAMH | NGDSR | SYGGN | IRNYL | S (SEQ | SFPLT | PGGSLRLSCAASG | GDRVTITCQASQDIR |
| | (SEQ | YYA | YGMDV | N | ID NO: | F | FTFDDFAMHWVRQ | NYLNWYQQKPGKAPK |
| | ID | (SEQ | W | (SEQ | 139) | (SEQ | APGKGLEWVSGIS | LLIYKASTLESGVPS |
| | NO: | ID | (SEQ | ID | | ID | GNGDSRYYADSVK | RFSGSGSGTDFTLTI |
| | 277) | NO: | ID | NO: | | NO: | GRFTISRDNSKNT | SSLQPEDFATYYCQQ |
| | | 278) | NO: | 280) | | 167) | LYLQMNSLRAEDT | ANSFPLTFGPGTKVD |
| | | | 279) | | | | AVYYCARDASYGG | IK (SEQ ID NO: |
| | | | | | | | NYGMDVWGQGTTV | 533) |
| | | | | | | | TVSS (SEQ ID | |
| | | | | | | | NO: 532) | |
| 56. | FTFSS | SAIGT | CAREW | RASQS | GASNLQ | CQQSY | EVQLVESGGGLVK | DIQMTQSPSSLSASV |
| | YWMS | GGGTY | LVPYY | ISRWL | S (SEQ | STPWT | PGGSLRLSCAASG | GDRVTITCRASQSIS |
| | (SEQ | YA | GMDVW | A | ID NO: | F | FTFSSYWMSWVRQ | RWLAWYQQKPGKAPK |
| | ID | (SEQ | (SEQ | (SEQ | 284) | (SEQ | APGKGLEWVSAIG | LLIYGASNLQSGVPS |
| | NO: | ID | ID | ID | | ID | TGGGTYYAAPVKG | RFSGSGSGTDFTLTI |
| | 169) | NO: | NO: | NO: | | NO: | RFTISRDDSKNTL | SSLQPEDFATYYCQQ |
| | | 251) | 282) | 283) | | 114) | YLQMNSLKTEDTA | SYSTPWTFGQGTKVE |
| | | | | | | | VYYCAREWLVPYY | IK (SEQ ID NO: |
| | | | | | | | GMDVWGQGTTVTV | 535) |
| | | | | | | | SS (SEQ ID | |
| | | | | | | | NO: 534) | |
| 57. | FSVSS | AGISY | CARSR | KSSQS | WASTRQ | CHQYY | EVQLLESGGGLVQ | DIVMTQSPDSLAVSL |
| | NYMS | DGSSK | GIAAR | VLYSS | S (SEQ | GHPPT | PGGSLRLSCAASG | GERATINCKSSQSVL |
| | (SEQ | PYA | PLQHW | NNKNY | ID NO: | F | FSVSSNYMSWVRQ | YSSNNKNYLAWYQQK |
| | ID | (SEQ | (SEQ | LA | 290) | (SEQ | APGKGLEWVAGIS | PGQPPKLLIYWASTR |
| | NO: | ID | ID | (SEQ | | ID | YDGSSKPYADSVK | QSGVPDRFSGSGSGT |
| | 286) | NO: | NO: | ID | | NO: | GRFTISRDNSKNT | DFTLTISSLQAEDVA |
| | | 287) | 288) | NO: | | 291) | LYLQMNSLRAEDT | VYYCHQYYGHPPTFG |
| | | | | 289) | | | AVYYCARSRGIAA | GGTKVEIK (SEQ |
| | | | | | | | RPLQHWGQGTLVT | ID NO: 537) |
| | | | | | | | VSS (SEQ ID | |
| | | | | | | | NO: 536) | |
| 58. | FSVSS | AGISY | CARSR | KSSQS | QASTRQ | CHQYY | EVQLLESGGGLVQ | DIVMTQSPDSLAVSL |
| | NYMS | DGSSK | GIAAR | VLYSS | S (SEQ | GHPPT | PGGSLRLSCAASG | GERATINCKSSQSVL |
| | (SEQ | PYA | PLQHW | NNKNY | ID NO: | F | FSVSSNYMSWVRQ | YSSNNKNYLAWYQQK |
| | ID | (SEQ | (SEQ | LA | 293) | (SEQ | APGKGLEWVAGIS | PGQPPKLLIYQASTR |
| | NO: | ID | | (SEQ | | ID | YDGSSKPYADSVK | QSGVPDRFSGSGSGT |
| | 286) | NO: | ID | ID | | NO: | GRFTISRDNSKNT | DFTLTISSLQAEDVA |
| | | 287) | NO: | NO: | | 291) | LYLQMNSLRAEDT | VYYCHQYYGHPPTFG |
| | | | 288) | 289) | | | AVYYCARSRGIAA | GGTKVEIK (SEQ |
| | | | | | | | RPLQHWGQGTLVT | ID NO: 538) |
| | | | | | | | VSS (SEQ ID | |
| | | | | | | | NO: 536) | |
| 59. | FSFSD | SAISG | CARDG | RASQG | DASNLE | CQQSY | EVQLLESGGGLVQ | DIQMTQSPSSLSASV |
| | YGMH | SGGST | GWQPA | ISNNL | T (SEQ | STPLT | PGGSLRLSCAASG | GDRVTITCRASQGIS |
| | (SEQ | YYA | AILDY | N | ID NO: | F | FSFSDYGMHWVRQ | NNLNWYQQKPGKAPK |
| | ID | (SEQ | W | (SEQ | 159) | (SEQ | APGKGLEWVSAIS | LLIYDASNLETGVPS |
| | NO: | ID | (SEQ | ID | | ID | GSGGSTYYADSVK | RFSGSGSGTDFTLTI |
| | 295) | NO: | ID | NO: | | NO: | GRFTISRDNSKNT | SSLQPEDFATYYCQQ |
| | | 103) | NO: | 105) | | 173) | LYLQMNSLRAEDT | SYSTPLTFGGGTKVE |
| | | | 296) | | | | AVYYCARDGGWQP | IK (SEQ ID NO: |
| | | | | | | | AAILDYWGQGTLV | 540) |
| | | | | | | | TVSS (SEQ ID | |
| | | | | | | | NO: 539) | |
| 60. | FTFSD | SVIYG | CARDP | RASQG | DASNLE | CQQSY | EVQLLESGGGLVQ | DIQMTQSPSSLSASV |
| | HGMH | GESTY | AVAGG | ISNYL | T (SEQ | STCYT | PGGSLRLSCAASG | GDRVTITCRASQGIS |
| | (SEQ | YA | GIFDY | A | ID NO: | F | FTFSDHGMHWVRQ | NYLAWYQQKPGKAPK |
| | ID | (SEQ | W | (SEQ | 159) | (SEQ | APGKGLEWVSVIY | LLIYDASNLETGVPS |
| | NO: | ID | (SEQ | ID | | ID | GGESTYYADSVKG | RFSGSGSGTDFTLTI |
| | 298) | NO: | ID | NO: | | NO: | RFTISRDNSKNTL | SSLQPEDFATYYCQQ |
| | | 299) | NO: | 218) | | 301) | YLQMNSLRAEDTA | SYSTCYTFGQGTKLE |
| | | | 300) | | | | VYYCARDPAVAGG | IK (SEQ ID NO: |
| | | | | | | | GIFDYWGQGTLVT | 542) |
| | | | | | | | VSS (SEQ ID | |
| | | | | | | | NO: 541) | |
| 61. | DTFTG | GWINP | CARSG | RASQT | DASTLQ | CQQYS | QVQLVQSGAEVKK | DIQMTQSPSSLSASV |
| | YYIH | NSGGT | LWLGS | ISIWL | S (SEQ | SYPLT | PGASVKVSCKASG | GDRVTITCRASQTIS |
| | (SEQ | NYA | YYGMD | A | ID NO: | F | DTFTGYYIHWVRQ | IWLAWYQQKPGKAPK |
| | ID | (SEQ | VW | (SEQ | 307) | (SEQ | APGQGLEWMGWIN | LLIYDASTLQSGVPS |
| | NO: | ID | (SEQ | ID | | ID | PNSGGTNYAQKFQ | RFSGSGSGTDFTLTI |
| | 303) | NO: | ID | NO: | | NO: | GRVTMTRDTSTST | SSLQPEDFATYYCQQ |
| | | 304) | NO: | 306) | | 308) | VYMELSSLRSEDT | YSSYPLTFGQGTKVE |
| | | | 305) | | | | AVYYCARSGLWLG | IK (SEQ ID NO: |
| | | | | | | | SYYGMDVWGQGTL | 544) |
| | | | | | | | VTVSS (SEQ ID | |
| | | | | | | | NO: 543) | |
| 62. | YTFTS | GWINP | CARSP | RASHF | AASTLQ | CQQSY | QVQLVQSGAEVKK | DIQMTQSPSSLSASV |
| | YDIN | NSGTT | YYYYG | ISRWV | S (SEQ | SGISF | PGASVKVSCKASG | GDRVTITCRASHFIS |
| | (SEQ | GYA | MDVW | A | ID NO: | (SEQ | YTFTSYDINWVRQ | RWVAWYQQKPGKAPK |
| | ID | (SEQ | (SEQ | (SEQ | 113) | ID | APGQGLEWMGWIN | LLIYAASTLQSGVPS |
| | NO: | ID | ID | ID | | NO: | PNSGTTGYAQKFQ | RFSGSGSGTDFTLTI |
| | 310) | NO: | NO: | NO: | | 314) | GRVTMTRDTSTST | SSLQPEDFATYYCQQ |
| | | 311) | 312) | 313) | | | VYMELSSLRSEDT | SYSGISFGPGTKVDI |
| | | | | | | | AVYYCARSPYYYY | K (SEQ ID NO: |
| | | | | | | | GMDVWGQGTTVTV | 546) |
| | | | | | | | SS (SEQ ID | |
| | | | | | | | NO: 545) | |
| 63. | FTFNN | SRINS | CARGA | RASQS | ATSSRA | CQQYY | EVQLLESGGGLVQ | EIVMTQSPATLSVSP |
| | YGMN | DGSST | YYYYY | VSGSY | S (SEQ | SGLTF | PGGSLRLSCAASG | GERATLSCRASQSVS |
| | (SEQ | SYA | MDVW | LA | ID NO: | (SEQ | FTFNNYGMNWVRQ | GSYLAWYQQKPGQAP |
| | ID | (SEQ | (SEQ | (SEQ | 320) | ID | APGKGLEWVSRIN | RLLIYATSSRASGIP |
| | NO: | ID | ID | ID | | NO: | SDGSSTSYADSVK | ARFSGSGSGTEFTLT |
| | 316) | NO: | NO: | NO: | | 321) | GRFTISRDNSKNT | ISSLQSEDFAVYYCQ |
| | | 317) | 318) | 319) | | | LYLQMNSLRAEDT | QYYSGLTFGQGTKVE |
| | | | | | | | AVYYCARGAYYYY | IK (SEQ ID NO: |
| | | | | | | | YMDVWGQGTLVTV | 548) |
| | | | | | | | SS (SEQ ID | |
| | | | | | | | NO: 547) | |
| 64. | FTFSN | AHIWN | CARDR | RASQD | DASSLE | CQQAT | EVQLLESGGGLVQ | DIQMTQSPSSLSASV |
| | SDMN | DGSQK | TDPGY | IRNYL | T (SEQ | SLPLT | PGGSLRLSCAASG | GDRVTITCRASQDIR |
| | (SEQ | YYA | SSAMD | G | ID NO: | F | FTFSNSDMNWVRQ | NYLGWYQQKPGKAPK |
| | ID | (SEQ | VW | (SEQ | 327) | (SEQ | APGKGLEWVAHIW | LLIYDASSLETGVPS |
| | NO: | ID | (SEQ | ID | | ID | NDGSQKYYADSVK | RFSGSGSGTDFTLTI |
| | 323) | NO: | ID | NO: | | NO: | GRFTISRDNSKNT | SSLQPEDFATYYCQQ |
| | | 324) | NO: | 326) | | 328) | LYLQMNSLRAEDT | ATSLPLTFGGGTKVE |
| | | | 325) | | | | AVYYCARDRTDPG | IK (SEQ ID NO: |
| | | | | | | | YSSAMDVWGQGTT | 550) |
| | | | | | | | VTVSS (SEQ ID | |
| | | | | | | | NO: 549) | |
| 65. | YTFTS | GWMNP | CAKDS | RASQD | QASSLE | CQQSY | QVQLVQSGAEVKK | DIQMTQSPSSLSASV |
| | YDIN | NSGNT | DYSNL | ITNDL | S (SEQ | TIPLT | PGASVKVSCKASG | GDRVTITCRASQDIT |
| | (SEQ | GYA | LWDYW | G | ID NO: | F | YTFTSYDINWVRQ | NDLGWYQQKPGKAPK |
| | ID | (SEQ | (SEQ | (SEQ | 332) | (SEQ | APGQGLEWMGWMN | LLIYQASSLESGVPS |
| | NO: | ID | ID | ID | | ID | PNSGNTGYAQKFQ | RFSGSGSGTDFTLTI |
| | 310) | NO: | NO: | NO: | | NO: | GRVTMTRDTSTST | SSLQPEDFATYYCQQ |
| | | 205) | 330) | 331) | | 333) | VYMELSSLRSEDT | SYTIPLTFGQGTKVE |
| | | | | | | | AVYYCAKDSDYSN | IK (SEQ ID NO: |
| | | | | | | | LLWDYWGQGTLVT | 552) |
| | | | | | | | VSS (SEQ ID | |
| | | | | | | | NO: 551) | |
| 66. | YTFTG | GIINP | CARDG | RASQG | SNLET | QQYYS | QVQLVQSGAEVKK | DIQMTQSPSSLSASV |
| | HYMH | SGGST | AWFGE | ISNWL | (SEQ | FPLYT | PGASVKVSCKASG | GDRVTITCRASQGIS |
| | (SEQ | SYA | EYYYG | A | ID NO: | (SEQ | YTFTGHYMHWVRQ | NWLAWYQQKPGKAPK |
| | ID | (SEQ | MDVW | (SEQ | 491) | ID | APGQGLEWMGIIN | LLIYDASNLETGVPS |
| | NO: | ID | (SEQ | ID | | NO: | PSGGSTSYAQKFQ | RFSGSGSGTDFTLTI |
| | 244) | NO: | ID | NO: | | 555) | GRVTMTRDTSTST | SSLQPEDFATYYCQQ |
| | | 69) | NO: | 554) | | | VYMELSSLRSEDT | YYSFPLYTFGQGTKV |
| | | | 553) | | | | AVYYCARDGAWFG | EIK (SEQ ID NO: |
| | | | | | | | EEYYYGMDVWGQG | 557) |
| | | | | | | | TTVTVSS (SEQ | |
| | | | | | | | ID NO: 556) | |
| 67. | YTFTG | GMIYP | CAMTG | RASQG | STLQS | QQSYS | QVQLVQSGAEVKK | DIQMTQSPSSLSASV |
| | YYMH | RDGST | WGYGM | INNYL | SEQ | APPT | PGASVKVSCKASG | GDRVTITCRASQGIN |
| | (SEQ | SYA | DVW | A | ID NO: | (SEQ | YTFTGYYMHWVRQ | NYLAWYQQKPGKAPK |
| | ID | (SEQ | (SEQ | (SEQ | 420) | ID | APGQGLEWMGMIY | LLIYDASTLQSGVPS |
| | NO: | ID | ID | ID | | NO: | PRDGSTSYAQKFQ | RFSGSGSGTDFTLTI |
| | 128) | NO: | NO: | NO: | | 561) | GRVTMTRDTSTST | SSLQPEDFATYYCQQ |
| | | 558) | 559) | 560) | | | VYMELSSLRSEDT | SYSAPPTFGQGTKLE |
| | | | | | | | AVYYCAMTGWGYG | IK (SEQ ID NO: |
| | | | | | | | MDVWGKGTTVTVS | 563) |
| | | | | | | | S (SEQ ID NO: | |
| | | | | | | | 562) | |
| 68. | FTFGD | AVVSY | CAKDI | RASQN | DASNLE | CQQAN | EVQLLESGGGLVQ | DIQMTQSPSSLSASV |
| | YAMS | DGTNK | CSSTS | INNYV | T (SEQ | SFPPT | PGGSLRLSCAASG | GDRVTITCRASQNIN |
| | (SEQ | YYA | CYFDL | N | ID NO: | F | FTFGDYAMSWVRQ | NYVNWYQQKPGKAPK |
| | ID | (SEQ | W | (SEQ | 159) | (SEQ | APGKGLEWVAVVS | LLIYDASNLETGVPS |
| | NO: | ID | (SEQ | ID | | ID | YDGTNKYYADSVK | RFSGSGSGTDFTLTI |
| | 233) | NO: | ID | NO: | | NO: | GRFTISRDNSKNT | SSLQPEDFATYYCQQ |
| | | 335) | NO: | 337) | | 338) | LYLQMNSLRAEDT | ANSFPPTFGQGTRLE |
| | | | 336) | | | | AVYYCAKDICSST | IK (SEQ ID NO: |
| | | | | | | | SCYFDLWGRGTLV | 565) |
| | | | | | | | TVSS (SEQ ID | |
| | | | | | | | NO: 564) | |
| 69. | YTFTS | GIIDP | CAREE | RASQG | ATSSLQ | CQQTY | QVQLVQSGAEVKK | DIQMTQSPSSLSASV |
| | YYMH | SGGST | WSSGG | ISSYL | T (SEQ | SIPIT | PGASVKVSCKASG | GDRVTITCRASQGIS |
| | (SEQ | SYA | VGYFD | A | ID NO: | F | YTFTSYYMHWVRQ | SYLAWYQQKPGKAPK |
| | ID | (SEQ | YW | (SEQ | 343) | (SEQ | APGQGLEWMGIID | LLIYATSSLQTGVPS |
| | NO: | ID | (SEQ | ID | | ID | PSGGSTSYAQKFQ | RFSGSGSGTDFTLTI |
| | 215) | NO: | ID | NO: | | NO: | GRVTMTRDTSTST | SSLQPEDFATYYCQQ |
| | | 340) | NO: | 342) | | 344) | VYMELSSLRSEDT | TYSIPITFGQGTRLE |
| | | | 341) | | | | AVYYCAREEWSSG | IK (SEQ ID NO: |
| | | | | | | | GVGYFDYWGQGTL | 567) |
| | | | | | | | VTVSS (SEQ ID | |
| | | | | | | | NO: 566) | |
| 70. | YPFTD | GWIKP | CARDR | RASQS | SSLQS | QQSYD | QVQLVQSGAEVKK | DIQMTQSPSSLSASV |
| | YYMH | NSGDT | FVGKP | ISVWL | (SEQ | TPYT | PGASVKVSCKASG | GDRVTITCRASQSIS |
| | (SEQ | EYA | DYYYY | A | ID NO: | (SEQ | YPFTDYYMHWVRQ | VWLAWYQQKPGKAPK |
| | ID | (SEQ | GMDVW | (SEQ | 362) | ID | APGQGLEWMGWIK | LLIYAASSLQSGVPS |
| | NO: | ID | (SEQ | ID | | NO: | PNSGDTEYAQKFQ | RFSGSGSGTDFTLTI |
| | 568) | NO: | ID | NO: | | 572) | GRVTMTRDTSTST | SSLQPEDFATYYCQQ |
| | | 569) | NO: | 571) | | | VYMELSSLRSEDT | SYDTPYTFGQGTKLE |
| | | | 570) | | | | AVYYCARDRFVGK | IK (SEQ ID NO: |
| | | | | | | | PDYYYYGMDVWGQ | 574) |
| | | | | | | | GTMVTVSS (SEQ | |
| | | | | | | | ID NO: 573) | |
| 71. | YTFTS | GIINP | CARDS | RASQG | AASSLQ | CQQSY | QVQLVQSGAEVKK | DIQMTQSPSSLSASV |
| | YYMH | SGGST | VAGTG | ISNYF | G (SEQ | SLPYT | PGASVKVSCKASG | GDRVTITCRASQGIS |
| | (SEQ | SYA | GRYYG | A | ID NO: | F | YTFTSYYMHWVRQ | NYFAWYQQKPGKAPK |
| | ID | (SEQ | MDVW | (SEQ | 352) | (SEQ | APGQGLEWMGIIN | LLIYAASSLQGGVPS |
| | NO: | ID | (SEQ | ID | | ID | PSGGSTSYAQKFQ | RFSGSGSGTDETLTI |
| | 215) | NO: | ID | NO: | | NO: | GRVTMTRDTSTST | SSLQPEDFATYYCQQ |
| | | 69) | NO: | 351) | | 353) | VYMELSSLRSEDT | SYSLPYTFGQGTKLE |
| | | | 350) | | | | AVYYCARDSVAGT | IK (SEQ ID NO: |
| | | | | | | | GGRYYGMDVWGQG | 576) |
| | | | | | | | TLVTVSS (SEQ | |
| | | | | | | | ID NO: 575) | |
| 72. | YTFTS | GVINP | CASGA | RASQS | SYLAT | QQSYS | QVQLVQSGAEVKK | DIQMTQSPSSLSASV |
| | YYMH | IGGTT | PSYYY | ISSYL | (SEQ | TPLT | PGASVKVSCKASG | GDRVTITCRASQSIS |
| | (SEQ | TYA | YGMDV | N | ID NO: | (SEQ | YTFTSYYMHWVRQ | SYLNWYQQKPGKAPK |
| | ID | (SEQ | W | (SEQ | 579) | ID | APGQGLEWMGVIN | LLIYGTSYLATGVPS |
| | NO: | ID | (SEQ | ID | | NO: | PIGGTTTYAQKFQ | RFSGSGSGTDFTLTI |
| | 215) | NO: | ID | NO: | | 429) | GRVTMTRDTSTST | SSLQPEDFATYYCQQ |
| | | 577) | NO: | 172) | | | VYMELSSLRSEDT | SYSTPLTFGQGTKVE |
| | | | 578) | | | | AVYYCASGAPSYY | IK (SEQ ID NO: |
| | | | | | | | YYGMDVWGQGTLV | 581) |
| | | | | | | | TVSS (SEQ ID | |
| | | | | | | | NO: 580) | |
| 73. | YTFTS | GRINP | CARAG | QASQD | TALRT | QQSYS | QVQLVQSGAEVKK | DIQMTQSPSSLSASV |
| | NYVH | HSGDT | QLWSD | IRNYL | (SEQ | HPLT | PGASVKVSCKASG | GDRVTITCQASQDIR |
| | (SEQ | SYA | WYFDL | N | ID NO: | (SEQ | YTFTSNYVHWVRQ | NYLNWYQQKPGKAPK |
| | ID | (SEQ | W | SEQ | 585) | ID | APGQGLEWMGRIN | LLIYAATALRTGVPS |
| | NO: | ID | (SEQ | ID | | NO: | PHSGDTSYAQKFQ | RFSGSGSGTDFTLTI |
| | 582) | NO: | ID | NO: | | 586) | GRVTMTRDTSTST | SSLQPEDFATYYCQQ |
| | | 583) | NO: | 280) | | | VYMELSSLRSEDT | SYSHPLTFGQGTKVE |
| | | | 584) | | | | AVYYCARAGQLWS | IK (SEQ ID NO: |
| | | | | | | | DWYFDLWGRGTLV | 588) |
| | | | | | | | TVSS (SEQ ID | |
| | | | | | | | NO: 587) | |
| 74. | YTFTG | GIINP | CTTAD | RASQG | AASSLQ | CQQYY | QVQLVQSGAEVKK | DIQMTQSPSSLSASV |
| | YYMH | SGGNT | YYYYM | ISNYL | S (SEQ | SNADF | PGASVKVSCKASG | GDRVTITCRASQGIS |
| | (SEQ | KYA | DVW | A | ID NO: | (SEQ | YTFTGYYMHWVRQ | NYLAWYQQKPGKAPK |
| | ID | (SEQ | (SEQ | (SEQ | 65) | ID | APGQGLEWMGIIN | LLIYAASSLQSGVPS |
| | NO: | ID | ID | ID | | NO: | PSGGNTKYAQKFQ | RFSGSGSGTDFTLTI |
| | 128) | NO: | NO: | NO: | | 357) | GRVTMTRDTSTST | SSLQPEDFATYYCQQ |
| | | 355) | 356) | 218) | | | VYMELSSLRSEDT | YYSNADFGQGTKVEI |
| | | | | | | | AVYYCTTADYYYY | K (SEQ ID NO: |
| | | | | | | | MDVWGKGTTVTVS | 590) |
| | | | | | | | S (SEQ ID NO: | |
| | | | | | | | 589) | |
| 75. | FTFSD | SYISG | CARDR | RASQS | SSLQS | QQYKS | EVQLLESGGGLVQ | DIQMTQSPSSLSASV |
| | FWMH | DSGYT | PYYYY | VSRSL | SEQ | YPVT | PGGSLRLSCAASG | GDRVTITCRASQSVS |
| | (SEQ | NYA | MDVW | A | ID NO: | (SEQ | FTFSDFWMHWVRQ | RSLAWYQQKPGKAPK |
| | ID | (SEQ | (SEQ | (SEQ | 362) | ID | APGKGLEWISYIS | LLIYAASSLQSGVPS |
| | NO: | ID | ID | ID | | NO: | GDSGYTNYADSVK | RFSGSGSGTDFTLTI |
| | 359) | NO: | NO: | NO: | | 363) | GRFTISRDNSKNT | SSLQPEDFATYYCQQ |
| | | 170) | 360) | 361) | | | LYLQMNSLRAEDT | YKSYPVTFGQGTKVE |
| | | | | | | | AVYYCARDRPYYY | IK (SEQ ID NO: |
| | | | | | | | YMDVWGKGTTVTV | 592) |
| | | | | | | | SS (SEQ ID | |
| | | | | | | | NO: 591) | |
| 76. | FTFDD | SDISG | CAKDV | QASQD | SYLQS | QQAHN | EVQLLESGGGLVQ | DIQMTQSPSSLSASV |
| | YTMH | SGGST | VVAGT | ISNYL | (SEQ | YPIT | PGGSLRLSCAASG | GDRVTITCQASQDIS |
| | (SEQ | YYA | PLHFD | N | ID NO: | (SEQ | FTFDDYTMHWVRQ | NYLNWYQQKPGKAPK |
| | ID | (SEQ | YW | (SEQ | 368) | ID | APGKGLEWVSDIS | LLIYAASYLQSGVPS |
| | NO: | ID | (SEQ | ID | | NO: | GSGGSTYYADSVK | RFSGSGSGTDFTLTI |
| | 365) | NO: | ID | NO: | | 369) | GRFTISRDNSKNT | SSLQPEDFATYYCQQ |
| | | 366) | NO: | 138) | | | LYLQMNSLRAEDT | AHNYPITFGQGTRLE |
| | | | 367) | | | | AVYYCAKDVVVAG | IK (SEQ ID NO: |
| | | | | | | | TPLHFDYWGQGTL | 594) |
| | | | | | | | VTVSS (SEQ ID | |
| | | | | | | | NO: 593) | |
| 77. | FTFSN | ASISS | CAREV | RASQS | SSLQS | QQANA | EVQLLESGGGLVQ | DIQMTQSPSSLSASV |
| | AWMS | TSAYI | VGATT | ISTWL | SEQ | FPPT | PGGSLRLSCAASE | GDRVTITCRASQSIS |
| | (SEQ | DYA | FDYW | A | ID NO: | (SEQ | FTFSNAWMSWVRQ | TWLAWYQQKPGKAPK |
| | ID | (SEQ | (SEQ | (SEQ | 362) | ID | APGKGLEWVASIS | LLIYAASSLQSGVPS |
| | NO: | ID | ID | ID | | NO: | STSAYIDYADSVK | RFSGSGSGTDFTLTI |
| | 183) | NO: | NO: | NO: | | 374) | GRFTISRDNSKNT | SSLQPEDFATYYCQQ |
| | | 371) | 372) | 373) | | | LYLQMNSLRAEDT | ANAFPPTFGQGTRLE |
| | | | | | | | AVYYCAREVVGAT | IK (SEQ ID NO: |
| | | | | | | | TFDYWGQGTLVTV | 596) |
| | | | | | | | SS (SEQ ID | |
| | | | | | | | NO: 595) | |
| 78. | GTFSS | GWMEP | CAKGG | KSSQS | STRES | QQYYS | QVQLVQSGAEVKK | DIVMTQSPDSLAVSL |
| | YAIS | HTGNT | FSWFD | VLYSS | (SEQ | TPPT | PGSSVKVSCKASG | GERATINCKSSQSVL |
| | (SEQ | RYA | PW | NNKNY | ID NO: | (SEQ | GTFSSYAISWVRQ | YSSNNKNYLAWYQQK |
| | ID | (SEQ | (SEQ | LA | 378) | ID | APGQGLEWMGWME | PGQPPKLLIYWASTR |
| | NO: | ID | ID | (SEQ | | NO: | PHTGNTRYAQKFQ | ESGVPDRFSGSGSGT |
| | 77) | NO: | NO: | ID | | 379) | GRVTITADESTST | DFTLTISSLQAEDVA |
| | | 376) | 377) | NO: | | | AYMELSSLRSEDT | VYYCQQYYSTPPTFG |
| | | | | 289) | | | AVYYCAKGGFSWF | QGTRLEIK (SEQ |
| | | | | | | | DPWGQGTLVTVSS | ID NO: 598) |
| | | | | | | | (SEQ ID NO: | |
| | | | | | | | 597) | |
| 79. | FTFDD | ASITS | CARER | RASQG | STRAT | QQYYT | EVQLLESGGGLVK | EIVMTQSPATLSVSP |
| | YAMH | SSAFI | VDWNS | ISNSY | (SEQ | YPPT | PGGSLRLSCAASG | GERATLSCRASQGIS |
| | (SEQ | DYA | YFDLW | LA | ID NO: | (SEQ | FTFDDYAMHWVRQ | NSYLAWYQQKPGQAP |
| | ID | (SEQ | (SEQ | (SEQ | 384) | ID | APGKGLEWVASIT | RLLIYGASTRATGIP |
| | NO: | ID | ID | ID | | NO: | SSSAFIDYAASVK | ARFSGSGSGTEFTLT |
| | 135) | NO: | NO: | NO: | | 385) | GRFTISRDDSKNT | ISSLQSEDFAVYYCQ |
| | | 381) | 382) | 383) | | | LYLQMNSLKTEDT | QYYTYPPTFGPGTKV |
| | | | | | | | AVYYCARERVDWN | DIK (SEQ ID NO: |
| | | | | | | | SYFDLWGRGTLVT | 600) |
| | | | | | | | VSS (SEQ ID | |
| | | | | | | | NO: 599) | |
| 80. | FTFDD | SAISG | CAKDL | QASQD | SNLEA | QQSYS | EVQLLESGGGLVQ | DIQMTQSPSSLSASV |
| | YAMH | SGGST | GVVVP | ISNHL | (SEQ | TPLT | PGGSLRLSCAASG | GDRVTITCQASQDIS |
| | (SEQ | YYA | AALDY | N | ID NO: | (SEQ | FTFDDYAMHWVRQ | NHLNWYQQKPGKAPK |
| | ID | (SEQ | W | (SEQ | 603) | ID | APGKGLEWVSAIS | LLIYDASNLEAGVPS |
| | NO: | ID | (SEQ | ID | | NO: | GSGGSTYYADSVK | RFSGSGSGTDFTLTI |
| | 135) | NO: | ID | NO: | | 429) | GRFTISRDNSKNT | SSLQPEDFATYYCQQ |
| | | 103) | NO: | 602) | | | LYLQMNSLRAEDT | SYSTPLTFGGGTKVE |
| | | | 601) | | | | AVYYCAKDLGVVV | IK (SEQ ID NO: |
| | | | | | | | PAALDYWGQGTTV | 605) |
| | | | | | | | TVSS (SEQ ID | |
| | | | | | | | NO: 604) | |
| 81. | FAFSS | AGTSG | CARET | RASQG | ANLEG | QQSDI | EVQLLESGGGLVK | DIQMTQSPSSLSASV |
| | HWMH | SGESR | YYYYY | ISNYL | (SEQ | FPPT | PGGSLRLSCAASG | GDRVTITCRASQGIS |
| | (SEQ | DYA | MDVW | A | ID NO: | (SEQ | FAFSSHWMHWVRQ | NYLAWYQQKPGKAPK |
| | ID | (SEQ | (SEQ | (SEQ | 390) | ID | APGKGLEWVAGTS | LLIYDAANLEGGVPS |
| | NO: | ID | ID | ID | | NO: | GSGESRDYADFVK | RFSGSGSGTDFTLTI |
| | 387) | NO: | NO: | NO: | | 391) | GRFTISRDDSKNT | SSLQPEDFATYYCQQ |
| | | 388) | 389) | 218) | | | LYLQMNSLKTEDT | SDIFPPTFGQGTKVE |
| | | | | | | | AVYYCARETYYYY | IK (SEQ ID NO: |
| | | | | | | | YMDVWGKGTTVTV | 607) |
| | | | | | | | SS (SEQ ID | |
| | | | | | | | NO: 606) | |
| 82. | YTFTR | GWINV | CARES | RASQS | SSLQS | QQSNS | QVQLVQSGAEVKK | DIQMTQSPSSLSASV |
| | HWIH | KTGGA | SGWYG | ISNYL | (SEQ | FPLT | PGASVKVSCKASG | GDRATITCRASQSIS |
| | (SEQ | GYA | TDVW | A | ID NO: | (SEQ | YTFTRHWIHWVRQ | NYLAWYQQKPGKAPK |
| | ID | (SEQ | (SEQ | (SEQ | 362) | ID | APGQGLEWMGWIN | LLIYAASSLQSGVPS |
| | NO: | ID | ID | ID | | NO: | VKTGGAGYAQKFQ | RFSGSGSGTDFTLTI |
| | 393) | NO: | NO: | NO: | | 397) | GRVTMTRDTSTST | SSLQPEDFATYYCQQ |
| | | 394) | 395) | 396) | | | VYMELSSLRSEDT | SNSFPLTFGGGTKVE |
| | | | | | | | AVYYCARESSGWY | IK (SEQ ID NO: |
| | | | | | | | GTDVWGQGTTVTV | 609) |
| | | | | | | | SS (SEQ ID | |
| | | | | | | | NO: 608) | |
| 83. | FTFSS | AAISY | CAREN | QASQD | NLRS | QQANS | EVQLLESGGGLVQ | DIQMTQSPSSLSASV |
| | YWMH | DGKYK | KQWLA | ISNFV | (SEQ | FPVT | PGGSLRLSCAASG | GDRVTITCQASQDIS |
| | (SEQ | DYE | SFDYW | N | ID NO: | (SEQ | FTFSSYWMHWVRQ | NFVNWYQQKPGKAPK |
| | ID | (SEQ | (SEQ | (SEQ | 402) | ID | APGKGLEWVAAIS | LLIYAANLRSGVPSR |
| | NO: | ID | ID | ID | | NO: | YDGKYKDYEDSVK | FSGSGSGTDFTLTIS |
| | 83) | NO: | NO: | NO: | | 403) | GRFTISRDNSKNT | SLQPEDFATYYCQQA |
| | | 399) | 400) | 401) | | | LYLQMNSLRAEDT | NSFPVTFGPGTKVDI |
| | | | | | | | AVYYCARENKQWL | (SEQ ID NO: |
| | | | | | | | ASFDYWGQGTLVT | 611) |
| | | | | | | | VSS (SEQ ID | |
| | | | | | | | NO: 610) | |
| 84. | GTFSS | GWISA | CASRV | QASEH | SSLQS | QQTDS | QVQLVQSGAEVKK | DIQMTQSPSSLSASV |
| | SAIS | YNGYT | HSGGS | IYNYL | (SEQ | IPIT | PGASVKVSCKASG | GDRVTITCQASEHIY |
| | (SEQ | NYA | YPDDY | N | ID NO: | (SEQ | GTFSSSAISWVRQ | NYLNWYQQKPGKAPK |
| | ID | (SEQ | W | (SEQ | 362) | ID | APGQGLEWMGWIS | LLIYAASSLQSGVPS |
| | NO: | ID | (SEQ | ID | | NO: | AYNGYTNYAQKFQ | RFSGSGSGTDFTLTI |
| | 612) | NO: | ID | NO: | | 616) | GRVTMTRDTSTST | SSLQPEDFATYYCQQ |
| | | 613) | NO: | 615) | | | VYMELSSLRSEDT | TDSIPITFGQGTKVE |
| | | | 614) | | | | AVYYCASRVHSGG | IK (SEQ ID NO: |
| | | | | | | | SYPDDYWGQGTLV | 618) |
| | | | | | | | TVSS (SEQ ID | |
| | | | | | | | NO: 617) | |

[0474] In some embodiments, the antibody comprises the CDRs of Clone ID: 6, Clone ID: 75, or Clone ID: 79 of Table 7.

[0475] The IgG and scFv formats illustrated herein are simply non-limiting examples. The CDRs provided herein can be placed in different formats, including different VH and VL/VK formats and still be able to bind to MAdCAM.

[0476] Although the CDRs are illustrated in the tables provided herein, there are other ways to annotate or identify CDRs. For example, in some embodiments, the HCDR2 can have an extra amino acid at the N-terminus. For example, for the HCDR2 of Clone 6 the table indicates that it has a sequence of: SRINSYGTSTTYA (SEQ ID NO: 91). However, in some embodiments, the HCDR2 has a sequence of VSRINSYGTSTTYA (SEQ ID NO: 629), which is shown with an extra residue, a valine, at the N-terminus of the HCDR2. The valine is clearly illustrated in VH peptide of the tables provided herein. Therefore, in some embodiments, the HCDR2 comprises one additional amino acid immediately to the N-terminus of the HCDR2 listed in the table. The residue would be the residue that is immediately to the N-terminus of the HCDR2 found in the VH sequence provided for in the table in the same row. One of skill in the art with this information could immediately envisage the HCDR2 peptide sequence that has the additional amino acid residue immediately to the N-terminus of the HCDR2 listed in the table. These embodiments are sufficiently described and do not require application to list each of these different annotations and one of skill in the art with the guidance and description provided herein could write them out individually without any undue experimentation.

[0477] Similarly, the HCDR3 can exclude the cysteine residue. Each of the HCDR3 polypeptides provided for in Tables 6 and 7 begins with a cysteine residue. In some embodiments, the HCDR3 does not include the cysteine. Furthermore, in some embodiments, the HCDR3 does not have the last C-terminal residue illustrated in Table 6 and 7 provided for herein. Therefore, in some embodiments, the HCDR3 does not have the cysteine and/or the last C-terminal residue illustrated in the tables. One of skill in the art with this information could immediately envisage the HCDR3 peptide sequence that does not have the cysteine and/or the last C-terminal residue illustrated in the tables. These embodiments are sufficiently described and do not require application to list each of these different annotations and one of skill in the art with the guidance and description provided herein could write them out individually without any undue experimentation.

[0478] In some embodiments, the light chain CDR2 can have one or two extra amino acid residues at the N-terminus. These additional residues would be those that are immediately to the N-terminus of the light chain CDR2 (LCDR2) present in the VL/VK chain provided for herein, in the same row as the CDRs that are listed. For example, the LCDR2 of Clone 6 is provided as GASSLQS (SEQ ID NO: 87), but in some embodiments could be IYGASSLQS (SEQ ID NO: 630) or YGASSLQS (SEQ ID NO: 631). One of skill in the art with this information could immediately envisage the LCDR2 peptide sequence that has one or two extra amino acid residues at the N-terminus of the LCDR2 sequence provided for herein. These embodiments are sufficiently described and do not require application to list each of these different annotations and one of skill in the art with the guidance and description provided herein could write them out individually without any undue experimentation.

[0479] There are also alternative systems for annotating CDRs, all of which can be used. For example, CDRs can be chosen based on the Kabat systems, the IMGT system, or the CHOTHIA. Other proprietary systems can also be used, which may be based on the predicted 3-dimensional structure of the protein. Accordingly, in some embodiments, the CDRs of Clone ID: 6, Clone ID: 75, or Clone ID: 79 of Table 7 can also be characterized as shown in Table 8. These alternative CDRs can be substituted for these clone referenced in Table 7 or the equivalent clone numbering in Table 6, i.e., Clone 6, Clone 59, and Clone 63.

TABLE 8
Alterative CDRs for Certain Clones

| Clone | | | | | | | |
|---|---|---|---|---|---|---|---|
| No. | | | | | | | |
| (Table | Annotation | | | | | | |
| 7) | System | LCDR1 | LCDR2 | LCDR3 | HCDR1 | HCDR2 | HCDR3 |
| 6 | Proprietary | RASQIIG | SSLQS | QQSYRLPFT | FTFNNYAF | SRINSYGTST | CAREGPVAGY |
| | | TNLA | (SEQ ID | (SEQ ID | H (SEQ | TYA (SEQ | WYFDLW |
| | | (SEQ ID | NO: | NO: 632) | ID NO: | ID NO: 91) | (SEQ ID |
| | | NO: 93) | 362) | | 90) | | NO: 92) |
| | Other | RASQIIG | GASSLQS | CQQSYRLPF | FTFNNYAF | SRINSYGTST | CAREGPVAGY |
| | Annotation | TNLA | (SEQ ID | TF (SEQ | H (SEQ | TYA (SEQ | WYFDLW |
| | | (SEQ ID | NO: 87) | ID NO: | ID NO: | ID NO: 91) | (SEQ ID |
| | | NO: 93) | | 94) | 90 | | NO: 92) |
| | Kabat | RASQIIG | GASSLQS | QQSYRLPFT | NYAFH | RINSYGTSTT | EGPVAGYWYF |
| | | TNLA | (SEQ ID | (SEQ ID | (SEQ ID | YADSVKG | DL (SEQ ID |
| | | (SEQ ID | NO: 87) | NO: 632) | NO: 633) | (SEQ ID | NO: 635) |
| | | NO: 93) | | | | NO: 634) | |
| | IMGT | QIIGTN | GAS | QQSYRLPFT | GFTFNNYA | INSYGTST | AREGPVAGYW |
| | | (SEQ ID | | (SEQ ID | (SEQ ID | (SEQ ID | YFDL (SEQ |
| | | NO: | | NO: 632) | NO: 637) | NO: 638) | ID NO: |
| | | 636) | | | | | 639) |
| | CHOTHIA | RASQIIG | GASSLQS | QQSYRLPFT | GFTFNNY | NSYGTS | EGPVAGYWYF |
| | | TNLA | (SEQ ID | (SEQ ID | (SEQ ID | (SEQ ID | DL (SEQ ID |
| | | (SEQ ID | NO: 87) | NO: 632) | NO: 640) | NO: 641) | NO: 635) |
| | | NO: 93) | | | | | |
| 75 | Proprietary | RASQSVS | SSLQS | QQYKSYPVT | FTFSDFWM | SYISGDSGYT | CARDRPYYYY |
| | | RSLA | (SEQ ID | (SEQ ID | H (SEQ | NYA (SEQ | MDVW (SEQ |
| | | (SEQ ID | NO: | NO: 363) | ID NO: | ID NO: | ID NO: |
| | | NO: | 362) | | 359) | 170) | 360) |
| | | 361) | | | | | |
| | Other | RASQSVS | AASSLQS | CQQYKSYPV | FTFSDFWM | SYISGDSGYT | CARDRPYYYY |
| | Annotation | RSLA | (SEQ ID | TF (SEQ | H (SEQ | NYA (SEQ | MDVW (SEQ |
| | | (SEQ ID | NO: 65) | ID NO: | ID NO: | ID NO: | ID NO: |
| | | NO: | | 642) | 359) | 170) | 360) |
| | | 361) | | | | | |
| | Kabat | RASQSVS | AASSLQS | QQYKSYPVT | DFWMH | YISGDSGYTN | DRPYYYYMDV |
| | | RSLA | (SEQ ID | (SEQ ID | (SEQ ID | YADSVKG | (SEQ ID |
| | | (SEQ ID | NO: 65) | NO: 363) | NO: 643) | (SEQ ID | NO: 645) |
| | | NO: | | | | NO: 644) | |
| | | 361) | | | | | |
| | IMGT | QSVSRS | AAS | QQYKSYPVT | GFTFSDFW | ISGDSGYT | ARDRPYYYYM |
| | | (SEQ ID | | (SEQ ID | (SEQ ID | (SEQ ID | DV (SEQ ID |
| | | NO: | | NO: 363) | NO: 647) | NO: 648) | NO: 649) |
| | | 646) | | | | | |
| | CHOTHIA | RASQSVS | AASSLQS | QQYKSYPVT | GFTFSDF | SGDSGY | DRPYYYYMDV |
| | | RSLA | (SEQ ID | (SEQ ID | (SEQ ID | (SEQ ID | (SEQ ID |
| | | (SEQ ID | NO: 65) | NO: 363) | NO: 650) | NO: 651) | NO: 645) |
| | | NO: | | | | | |
| | | 361) | | | | | |
| 79 | Proprietary | RASQGIS | STRAT | QQYYTYPPT | FTFDDYAM | ASITSSSAFI | CARERVDWNS |
| | | NSYLA | (SEQ ID | (SEQ ID | H (SEQ | DYA (SEQ | YFDLW (SEQ |
| | | (SEQ ID | NO: | NO: 385) | ID NO: | ID NO: | ID NO: |
| | | NO: | 384) | | 135) | 381) | 382) |
| | | 383) | | | | | |
| | Other | RASQGIS | GASTRAT | CQQYYTYPP | FTFDDYAM | ASITSSSAFI | CARERVDWNS |
| | Annotation | NSYLA | (SEQ ID | TF (SEQ | H (SEQ | DYA (SEQ | YFDLW (SEQ |
| | | (SEQ ID | NO: | ID NO: | ID NO: | ID NO: | ID NO: |
| | | NO: | 241) | 652) | 135) | 381) | 382) |
| | | 383) | | | | | |
| | Kabat | RASQGIS | GASTRAT | QQYYTYPPT | DYAMH | SITSSSAFID | ERVDWNSYFD |
| | | NSYLA | (SEQ ID | SEQ ID | (SEQ ID | YAASVKG | L (SEQ ID |
| | | (SEQ ID | NO: | NO: 385) | NO: 653) | (SEQ ID | NO: 655) |
| | | NO: | 241) | | | NO: 654) | |
| | | 383) | | | | | |
| | IMGT | QGISNSY | GAS | QQYYTYPPT | GFTFDDYA | ITSSSAFI | ARERVDWNSY |
| | | (SEQ ID | | (SEQ ID | (SEQ ID | (SEQ ID | FDL (SEQ |
| | | NO: | | NO: 385) | NO: 657) | NO: 658) | ID NO: |
| | | 656) | | | | | 659) |
| | CHOTHIA | RASQGIS | GASTRAT | QQYYTYPPT | GFTFDDY | TSSSAF | ERVDWNSYFD |
| | | NSYLA | (SEQ ID | (SEQ ID | (SEQ ID | (SEQ ID | L (SEQ ID |
| | | (SEQ ID | NO: | NO: 385) | NO: 660) | NO: 661) | NO: 655) |
| | | NO: | 241) | | | | |
| | | 383) | | | | | |

[0480] In some embodiments, the MAdCAM antibody is selected from the following table:

TABLE 9

| Clone | | | | | | | | |
|---|---|---|---|---|---|---|---|---|
| (Fab) | VH Seq | VL Seq | HCDR1 | HCDR2 | HCDR3 | LCDR1 | LCDR2 | LCDR3 |
| MIAB1 | EVQLLESGGGLVQ | EIVMTQSPATLS | FTFDDYA | ASITSSS | CAREPV | RASQG | GASTR | CQQYY |
| | PGGSLRLSCAASG | VSPGERATLSCR | MH (SEQ | AFIDYA | DWNSYF | ISNSY | AT | TYPPT |
| | FTFDDYAMHWVRQ | ASQGISNSYLAW | ID NO: | (SEQ ID | DLW | LA | (SEQ | F |
| | APGKGLEWVASIT | YQQKPGQAPRLL | 135) | NO: | (SEQ | (SEQ | ID | (SEQ |
| | SSSAFIDYADSVK | IYGASTRATGIP | | 381) | ID NO: | ID | NO: | ID |
| | GRFTISRDNSKNT | ARFSGSGSGTEF | | | 883) | NO: | 241) | NO: |
| | LYLQMNSLRAEDT | TLTISSLQSEDF | | | | 383) | | 652) |
| | AVYYCAREPVDWN | AVYYCQQYYTYP | | | | | | |
| | SYFDLWGQGTLVT | PTFGQGTKVEIK | | | | | | |
| | VSS (SEQ ID | (SEQ ID NO: | | | | | | |
| | NO: 662) | 663) | | | | | | |
| MIAB2 | EVQLLESGGGLVQ | EIVMTQSPATLS | FTFDDYA | ASITSSS | CARERV | RASQG | GASTR | CQQYY |
| | PGGSLRLSCAASG | VSPGERATLSCR | MH (SEQ | AFIDYA | DWNSYF | ISNSY | AT | TYPPT |
| | FTFDDYAMHWVRQ | ASQGISNSYLAW | ID NO: | (SEQ ID | DLW | LA | (SEQ | F |
| | APGKGLEWVASIT | YQQKPGQAPRLL | 135) | NO: | (SEQ | (SEQ | ID | (SEQ |
| | SSSAFIDYADSVK | IYGASTRATGIP | | 381) | ID NO: | ID | NO: | ID |
| | GRFTISRDNSKNT | ARFSGSGSGTEF | | | 382) | NO: | 241) | NO: |
| | LYLQMNSLRAEDT | TLTISSLQSEDF | | | | 383) | | 652) |
| | AVYYCARERVDWN | AVYYCQQYYTYP | | | | | | |
| | SYFDLWGQGTLVT | PTFGQGTKVEIK | | | | | | |
| | VSS (SEQ ID | (SEQ ID NO: | | | | | | |
| | NO: 664) | 663) | | | | | | |
| MIAB3 | EVQLLESGGGLVQ | EIVMTQSPATLS | FTFDDYA | ASITSSS | CARERV | RASQG | GASTR | CQQYY |
| | PGGSLRLSCAASG | VSPGERATLSCR | MH (SEQ | AFIDYA | DWNSYF | ISNSY | AT | TYPPT |
| | FTFDDYAMHWVRQ | ASQGISNSYLAW | ID NO: | (SEQ ID | DNW | LA | (SEQ | F |
| | APGKGLEWVASIT | YQQKPGQAPRLL | 135) | NO: | (SEQ | (SEQ | ID | (SEQ |
| | SSSAFIDYADSVK | IYGASTRATGIP | | 381) | ID NO: | ID | NO: | ID |
| | GRFTISRDNSKNT | ARFSGSGSGTEF | | | 884) | NO: | 241) | NO: |
| | LYLQMNSLRAEDT | TLTISSLQSEDF | | | | 383) | | 652) |
| | AVYYCARERVDWN | AVYYCQQYYTYP | | | | | | |
| | SYFDNWGQGTLVT | PTFGQGTKVEIK | | | | | | |
| | VSS (SEQ ID | (SEQ ID NO: | | | | | | |
| | NO: 665) | 663) | | | | | | |
| MIAB4 | EVQLLESGGGLVQ | EIVMTQSPATLS | FTLDDYA | ASITSSS | CARERV | RASQG | GASTR | CQQYY |
| | PGGSLRLSCAASG | VSPGERATLSCR | MH (SEQ | AFIDYA | DWNSYF | ISNSY | AT | TYPPT |
| | FTLDDYAMHWVRQ | ASQGISNSYLAW | ID NO: | (SEQ ID | DNW | LA | (SEQ | F |
| | APGKGLEWVASIT | YQQKPGQAPRLL | 885) | NO: | (SEQ | (SEQ | ID | (SEQ |
| | SSSAFIDYADSVK | IYGASTRATGIP | | 381) | ID NO: | ID | NO: | ID |
| | GRFTISRDNSKNT | ARFSGSGSGTEF | | | 884) | NO: | 241) | NO: |
| | LYLQMNSLRAEDT | TLTISSLQSEDF | | | | 383) | | 652) |
| | AVYYCARERVDWN | AVYYCQQYYTYP | | | | | | |
| | SYFDNWGQGTLVT | PTFGQGTKVEIK | | | | | | |
| | VSS (SEQ ID | (SEQ ID NO: | | | | | | |
| | NO: 666) | 663) | | | | | | |
| MIAB5 | EVQLLESGGGLVQ | EIVMTQSPATLS | FTFDDYA | ASITSSS | CARERV | RASQS | DASTR | CQQYY |
| | PGGSLRLSCAASG | VSPGERATLSCR | MH (SEQ | AFIDYA | DWNSYF | VGSYL | VT | TYPPT |
| | FTFDDYAMHWVRQ | ASQSVGSYLAWY | ID NO: | (SEQ ID | DLW | A | (SEQ | F |
| | APGKGLEWVASIT | QQKPGQAPRLLI | 135) | NO: | (SEQ | (SEQ | ID | (SEQ |
| | SSSAFIDYADSVK | YDASTRVTGIPA | | 381) | ID NO: | ID | NO: | ID |
| | GRFTISRDNSKNT | RFSGSGSGTEFT | | | 382) | NO: | 887) | NO: |
| | LYLQMNSLRAEDT | LTISSLQSEDFA | | | | 886) | | 652) |
| | AVYYCARERVDWN | VYYCQQYYTYPP | | | | | | |
| | SYFDLWGQGTLVT | TFGQGTKVEIK | | | | | | |
| | VSS (SEQ ID | (SEQ ID NO: | | | | | | |
| | NO: 664) | 667) | | | | | | |
| MIAB6 | EVQLLESGGGLVQ | EIVMTQSPATLS | FTFDDYA | ASITSSS | CARERV | RASQG | GASTR | CQQYE |
| | PGGSLRLSCAASG | VSPGERATLSCR | MH (SEQ | AFIDYA | LWNSYF | ISNSY | AT | RWPPT |
| | FTFDDYAMHWVRQ | ASQGISNSYLAW | ID NO: | (SEQ ID | DLW | LA | (SEQ | F |
| | APRKGLEWVASIT | YQQKPGQAPRLL | 135) | NO: | (SEQ | (SEQ | ID | (SEQ |
| | SSSAFIDYADSVK | IYGASTRATGIP | | 381) | ID NO: | ID | NO: | ID |
| | GRFTISRDNSKNT | ARFSGSGSGTEF | | | 888) | NO: | 241) | NO: |
| | LYLQMNSLRAEDT | TLTISSLQSEDF | | | | 383) | | 889) |
| | AVYYCARERVLWN | AVYYCQQYERWP | | | | | | |
| | SYFDLWGQGTLVT | PTFGQGTKVEIK | | | | | | |
| | VSS (SEQ ID | (SEQ ID NO: | | | | | | |
| | NO: 668) | 669) | | | | | | |
| MIAB7 | EVQLLESGGGLVQ | EIVMTQSPATLS | FTFDDYA | ASITSSS | CARERV | RACQG | GASTR | CQQYY |
| | PGGSLRLSCAASG | VSPGERATLSCR | MH (SEQ | AFIDYA | DWNSYF | ISNSY | AT | TYPPT |
| | FTFDDYAMHWVRQ | ACQGISNSYLAW | ID NO: | (SEQ ID | DLW | LA | (SEQ | F |
| | APGKGLEWVASIT | YQQKPGQAPRLL | 135) | NO: | (SEQ | (SEQ | ID | (SEQ |
| | SSSAFIDYADSVK | IYGASTRATGIP | | 381) | ID NO: | ID | NO: | ID |
| | GRFTISRDNSKNT | ARFSGSGSGTEF | | | 382) | NO: | 241) | NO: |
| | LYLQMNSLRAEDT | TLTISSLQSEDF | | | | 890) | | 652) |
| | AVYYCARERVDWN | AVYYCQQYYTYP | | | | | | |
| | SYFDLWGQGTLVT | PTFGQGTKVEIK | | | | | | |
| | VSS (SEQ ID | (SEQ ID NO: | | | | | | |
| | NO: 664) | 670) | | | | | | |
| MIAB8 | EVQLLESGGGLVQ | EIVMTQSPATLS | FTFDDYA | ASITSSS | CARERV | RASQS | DASAR | CQQYY |
| | PGGSLRLSCAASG | VSPGERATLSCR | MH (SEQ | AFIDYA | DWNSYF | VGSYL | AT | TYPPT |
| | FTFDDYAMHWVRQ | ASQSVGSYLAWY | ID NO: | (SEQ ID | DLW | A | (SEQ | F |
| | APGKGLEWVASIT | QQKPGQAPRLLI | 135) | NO: | (SEQ | (SEQ | ID | (SEQ |
| | SSSAFIDYADSVK | YDASARATGIPA | | 381) | ID NO: | ID | NO: | ID |
| | GRFTISRDNSKNT | RFSGSGSGTEFT | | | 382) | NO: | 891) | NO: |
| | LYLQMNSLRAEDT | LTISSLQSEDFA | | | | 886) | | 652) |
| | AVYYCARERVDWN | VYYCQQYYTYPP | | | | | | |
| | SYFDLWGQGTLVT | TFGQGTKVEIK | | | | | | |
| | VSS (SEQ ID | (SEQ ID NO: | | | | | | |
| | NO: 664) | 671) | | | | | | |
| MIAB9 | EVQLLESGGGLVQ | EIVMTQSPATLS | FTLDDYA | ASITSSS | CARERV | RASQG | GASTR | CQQYY |
| | PGGSLRLSCAASG | VSPGERATLSCR | MH (SEQ | AFIDYA | DWNSYF | ISNSY | AT | TYPPT |
| | FTLDDYAMHWVRQ | ASQGISNSYLAW | ID NO: | (SEQ ID | DLW | LA | (SEQ | F |
| | APGKGLEWVASIT | YQQKPGQAPRLL | 885 | NO: | (SEQ | (SEQ | ID | (SEQ |
| | SSSAFIDYADSVK | IYGASTRATGIP | | 381) | ID NO: | ID | NO: | ID |
| | GRFTISRDNSKNT | ARFSGSGSGTEF | | | 382) | NO: | 241) | NO: |
| | LYLQMNSLRAEDT | TLTISSLQSEDF | | | | 383) | | 652) |
| | AVYYCARERVDWN | AVYYCQQYYTYP | | | | | | |
| | SYFDLWGQGTLVT | PTFGQGTKVEIK | | | | | | |
| | VSS (SEQ ID | (SEQ ID NO: | | | | | | |
| | NO: 672) | 663) | | | | | | |
| MIAB10 | EVQLLESGGGLVQ | EIVMTQSPATLS | FTFDDYA | ASITSSS | CARERV | RASQG | GASTR | CQQYY |
| | PGGSLRLSCAASG | VSPGERATLSCR | MH (SEQ | AFIDYA | DWNSYF | ISNSY | AT | KYPPT |
| | FTFDDYAMHWVRQ | ASQGISNSYLAW | ID NO: | (SEQ ID | DLW | LA | (SEQ | F |
| | APGKGLEWVASIT | YQQKPGQAPRLL | 135) | NO: | (SEQ | (SEQ | ID | (SEQ |
| | SSSAFIDYADSVK | IYGASTRATGIP | | 381) | ID NO: | ID | NO: | ID |
| | GRFTISRDNSKNT | ARFSGSGSGTEF | | | 382 | NO: | 241) | NO: |
| | LYLQMNSLRAEDT | TLTISSLQSEDF | | | | 383) | | 892) |
| | AVYYCARERVDWN | AVYYCQQYYKYP | | | | | | |
| | SYFDLWGQGTLVT | PTFGQGTKVEIK | | | | | | |
| | VSS (SEQ ID | (SEQ ID NO: | | | | | | |
| | NO: 664) | 673) | | | | | | |
| MIAB11 | EVQLLESGGGLVQ | EIVMTQSPATLS | FTFDDYA | ASITSSS | CARERV | RASQG | GASTR | CQQYY |
| | PGGSLRLSCAASG | VSPGERATLSCR | MH (SEQ | AFIDYA | DWNSYF | ISNNY | AT | TYPPT |
| | FTFDDYAMHWVRQ | ASQGISNNYLAW | ID NO: | (SEQ ID | DLW | LA | (SEQ | F |
| | APGKGLEWVASIT | YQQKPGQAPRLL | 135) | NO: | (SEQ | (SEQ | ID | (SEQ |
| | SSSAFIDYADSVK | IYGASTRATGIP | | 381) | ID NO: | ID | NO: | ID |
| | GRFTISRDNSKNT | ARFSGSGSGTEF | | | 382) | NO: | 241) | NO: |
| | LYLQMNSLRAEDT | TLTISSLQSEDF | | | | 893) | | 652) |
| | AVYYCARERVDWN | AVYYCQQYYTYP | | | | | | |
| | SYFDLWGQGTLVT | PTFGQGTKVEIK | | | | | | |
| | VSS (SEQ ID | (SEQ ID NO: | | | | | | |
| | NO: 664) | 674) | | | | | | |
| MIAB12 | EVQLLESGGGLVQ | EIVMTQSPATLS | FTFDDYA | ASITSSS | CARERV | RACPG | GASTR | CQQYY |
| | PGGSLRLSCAASG | VSPGERATLSCR | MH (SEQ | AFIDYA | DWNSYF | ISNSY | AT | TYPPT |
| | FTFDDYAMHWVRQ | ACPGISNSYLAW | ID NO: | (SEQ ID | DLW | LA | (SEQ | F |
| | APGKGLEWVASIT | YQQKPGQAPRLL | 135) | NO: | (SEQ | (SEQ | ID | (SEQ |
| | SSSAFIDYADSVK | IYGASTRATGIP | | 381) | ID NO: | ID | NO: | ID |
| | GRFTISRDNSKNT | ARFSGSGSGTEF | | | 382) | NO: | 241) | NO: |
| | LYLQMNSLRAEDT | TLTISSLQSEDF | | | | 894) | | 652) |
| | AVYYCARERVDWN | AVYYCQQYYTYP | | | | | | |
| | SYFDLWGQGTLVT | PTFGQGTKVEIK | | | | | | |
| | VSS (SEQ ID | (SEQ ID NO: | | | | | | |
| | NO: 664) | 675) | | | | | | |
| MIAB13 | EVQLLESGGGLVQ | EIVMTQSPATLS | FTFDDYA | ASITSSS | CARERV | RASQN | DATTR | CQQYY |
| | PGGSLRLSCAASG | VSPGERATLSCR | MH (SEQ | AFIDYA | LWNSYF | VNNNL | AT | HWPQT |
| | FTFDDYAMHWVRQ | ASQNVNNNLAWY | ID NO: | (SEQ ID | DLW | A | (SEQ | F |
| | APGKGLEWVASIT | QQKPGQAPRLLI | 135) | NO: | (SEQ | (SEQ | ID | (SEQ |
| | SSSAFIDYADSVK | YDATTRATGIPA | | 381) | ID NO: | ID | NO: | ID |
| | GRFTISRDNSKNT | RFSGSGSGTEFT | | | 888) | NO: | 896) | NO: |
| | LYLQMNSLRAEDT | LTISSLQSEDFA | | | | 895) | | 897) |
| | AVYYCARERVLWN | VYYCQQYYHWPQ | | | | | | |
| | SYFDLWGQGTLVT | TFGQGTKVEIK | | | | | | |
| | VSS (SEQ ID | (SEQ ID NO: | | | | | | |
| | NO: 676) | 677) | | | | | | |
| MIAB14 | EVQLLESGGGLVQ | EIVMTQSPATLS | FTFDDYA | ASITSSS | CARERV | RASQN | DATTR | CQQYY |
| | PGGSLRLSCAASG | VSPGERATLSCR | MH (SEQ | AFIDYA | DWNSYF | VNNNL | AT | HWPQT |
| | FTFDDYAMHWVRQ | ASQNVNNNLAWY | ID NO: | (SEQ ID | DLW | A | (SEQ | F |
| | APGKGLEWVASIT | QQKPGQAPRLLI | 135) | NO: | (SEQ | (SEQ | ID | (SEQ |
| | SSSAFIDYADSVK | YDATTRATGIPA | | 381) | ID NO: | ID | NO: | ID |
| | GRFTISRDNSKNT | RFSGSGSGTEFT | | | 382) | NO: | 896) | NO: |
| | LYLQMNSLRAEDT | LTISSLQSEDFA | | | | 895) | | 897) |
| | AVYYCARERVDWN | VYYCQQYYHWPQ | | | | | | |
| | SYFDLWGQGTLVT | TFGQGTKVEIK | | | | | | |
| | VSS (SEQ ID | (SEQ ID NO: | | | | | | |
| | NO: 664) | 677) | | | | | | |
| MIAB15 | EVQLLESGGGLVQ | EIVMTQSPATLS | FTFDDYA | ASITSSS | CARERV | RASQN | DATTR | CQQYY |
| | PGGSLRLSCAASG | VSPGERATLSCR | MH (SEQ | AFIDYA | LWNSYF | VNNNY | AT | HWPQT |
| | FTFDDYAMHWVRQ | ASQNVNNNYLAW | ID NO: | (SEQ ID | DLW | LA | (SEQ | F |
| | APGKGLEWVASIT | YQQKPGQAPRLL | 135) | NO: | (SEQ | (SEQ | ID | (SEQ |
| | SSSAFIDYADSVK | IYDATTRATGIP | | 381) | ID NO: | ID | NO: | ID |
| | GRFTISRDNSKNT | ARFSGSGSGTEF | | | 888) | NO: | 896) | NO: |
| | LYLQMNSLRAEDT | TLTISSLQSEDF | | | | 898) | | 897) |
| | AVYYCARERVLWN | AVYYCQQYYHWP | | | | | | |
| | SYFDLWGQGTLVT | QTFGQGTKVEIK | | | | | | |
| | VSS (SEQ ID | (SEQ ID NO: | | | | | | |
| | NO: 676) | 678) | | | | | | |
| MIAB16 | EVQLLESGGGLVQ | EIVMTQSPATLS | FTFDDYA | ASITSSS | CARERV | RASQG | DATTR | CQQYY |
| | PGGSLRLSCAASG | VSPGERATLSCR | MH (SEQ | AFIDYA | LWNSYF | VNNNL | AT | HWPQT |
| | FTFDDYAMHWVRQ | ASQGVNNNLAWY | ID NO: | (SEQ ID | DLW | A | (SEQ | F |
| | APGKGLEWVASIT | QQKPGQAPRLLI | 135) | NO: | (SEQ | (SEQ | ID | (SEQ |
| | SSSAFIDYADSVK | YDATTRATGIPA | | 381) | ID NO: | ID | NO: | ID |
| | GRFTISRDNSKNT | RFSGSGSGTEFT | | | 888) | NO: | 896) | NO: |
| | LYLQMNSLRAEDT | LTISSLQSEDFA | | | | 899) | | 897) |
| | AVYYCARERVLWN | VYYCQQYYHWPQ | | | | | | |
| | SYFDLWGQGTLVT | TFGQGTKVEIK | | | | | | |
| | VSS (SEQ ID | (SEQ ID NO: | | | | | | |
| | NO: 676) | 679) | | | | | | |
| MIAB17 | EVQLLESGGGLVQ | EIVMTQSPATLS | FTFDDYA | ASITSSS | CARERV | RASQN | DATTR | CQQYY |
| | PGGSLRLSCAASG | VSPGERATLSCR | MH (SEQ | AFIDYA | LWNSYF | INNNL | AT | HWPQT |
| | FTFDDYAMHWVRQ | ASQNINNNLAWY | ID NO: | (SEQ ID | DLW | A | (SEQ | F |
| | APGKGLEWVASIT | QQKPGQAPRLLI | 135) | NO: | (SEQ | (SEQ | ID | (SEQ |
| | SSSAFIDYADSVK | YDATTRATGIPA | | 381) | ID NO: | ID | NO: | ID |
| | GRFTISRDNSKNT | RFSGSGSGTEFT | | | 888) | NO: | 896) | NO: |
| | LYLQMNSLRAEDT | LTISSLQSEDFA | | | | 900) | | 897) |
| | AVYYCARERVLWN | VYYCQQYYHWPQ | | | | | | |
| | SYFDLWGQGTLVT | TFGQGTKVEIK | | | | | | |
| | VSS (SEQ ID | (SEQ ID NO: | | | | | | |
| | NO: 676) | 680) | | | | | | |
| MIAB18 | EVQLLESGGGLVQ | EIVMTQSPATLS | FTFDDYA | ASITSSS | CARERV | RASQN | DATTR | CQQYY |
| | PGGSLRLSCAASG | VSPGERATLSCR | MH (SEQ | AFIDYA | LWNSYF | VSNNL | AT | HWPQT |
| | FTFDDYAMHWVRQ | ASQNVSNNLAWY | ID NO: | (SEQ ID | DLW | A | (SEQ | F |
| | APGKGLEWVASIT | QQKPGQAPRLLI | 135) | NO: | (SEQ | (SEQ | ID | SEQ |
| | SSSAFIDYADSVK | YDATTRATGIPA | | 381) | ID NO: | ID | NO: | ID |
| | GRFTISRDNSKNT | RFSGSGSGTEFT | | | 888) | NO: | 896) | NO: |
| | LYLQMNSLRAEDT | LTISSLQSEDFA | | | | 901) | | 897) |
| | AVYYCARERVLWN | VYYCQQYYHWPQ | | | | | | |
| | SYFDLWGQGTLVT | TFGQGTKVEIK | | | | | | |
| | VSS (SEQ ID | (SEQ ID NO: | | | | | | |
| | NO: 676) | 681) | | | | | | |
| MIAB19 | EVQLLESGGGLVQ | EIVMTQSPATLS | FTFDDYA | ASITSSS | CARERV | RASQN | DATTR | CQQYY |
| | PGGSLRLSCAASG | VSPGERATLSCR | MH (SEQ | AFIDYA | LWNSYF | VNNSL | AT | HWPQT |
| | FTFDDYAMHWVRQ | ASQNVNNSLAWY | ID NO: | (SEQ ID | DLW | A | (SEQ | F |
| | APGKGLEWVASIT | QQKPGQAPRLLI | 135) | NO: | (SEQ | (SEQ | ID | (SEQ |
| | SSSAFIDYADSVK | YDATTRATGIPA | | 381) | ID NO: | ID | NO: | ID |
| | GRFTISRDNSKNT | RFSGSGSGTEFT | | | 888) | NO: | 896) | NO: |
| | LYLQMNSLRAEDT | LTISSLQSEDFA | | | | 902) | | 897) |
| | AVYYCARERVLWN | VYYCQQYYHWPQ | | | | | | |
| | SYFDLWGQGTLVT | TFGQGTKVEIK | | | | | | |
| | VSS (SEQ ID | (SEQ ID NO: | | | | | | |
| | NO: 676) | 682) | | | | | | |
| MIAB20 | EVQLLESGGGLVQ | EIVMTQSPATLS | FTFDDYA | ASITSSS | CARERV | RASQN | GATTR | CQQYY |
| | PGGSLRLSCAASG | VSPGERATLSCR | MH (SEQ | AFIDYA | LWNSYF | VNNNL | AT | HWPQT |
| | FTFDDYAMHWVRQ | ASQNVNNNLAWY | ID NO: | (SEQ ID | DLW | A | (SEQ | F |
| | APGKGLEWVASIT | QQKPGQAPRLLI | 135) | NO: | (SEQ | (SEQ | ID | (SEQ |
| | SSSAFIDYADSVK | YGATTRATGIPA | | 381) | ID NO: | ID | NO: | ID |
| | GRFTISRDNSKNT | RFSGSGSGTEFT | | | 888) | NO: | 903) | NO: |
| | LYLQMNSLRAEDT | LTISSLQSEDFA | | | | 895) | | 897) |
| | AVYYCARERVLWN | VYYCQQYYHWPQ | | | | | | |
| | SYFDLWGQGTLVT | TFGQGTKVEIK | | | | | | |
| | VSS (SEQ ID | (SEQ ID NO: | | | | | | |
| | NO: 676) | 683) | | | | | | |
| MIAB21 | EVQLLESGGGLVQ | EIVMTQSPATLS | FTFDDYA | ASITSSS | CARERV | RASQN | DASTR | CQQYY |
| | PGGSLRLSCAASG | VSPGERATLSCR | MH (SEQ | AFIDYA | LWNSYF | VNNNL | AT | HWPQT |
| | FTFDDYAMHWVRQ | ASQNVNNNLAWY | ID NO: | (SEQ ID | DLW | A | (SEQ | F |
| | APGKGLEWVASIT | QQKPGQAPRLLI | 135) | NO: | (SEQ | (SEQ | ID | (SEQ |
| | SSSAFIDYADSVK | YDASTRATGIPA | | 381) | ID NO: | ID | NO: | ID |
| | GRFTISRDNSKNT | RFSGSGSGTEFT | | | 888) | NO: | 904) | NO: |
| | LYLQMNSLRAEDT | LTISSLQSEDFA | | | | 895) | | 897) |
| | AVYYCARERVLWN | VYYCQQYYHWPQ | | | | | | |
| | SYFDLWGQGTLVT | TFGQGTKVEIK | | | | | | |
| | VSS (SEQ ID | (SEQ ID NO: | | | | | | |
| | NO: 676) | 684) | | | | | | |
| MIAB22 | EVQLLESGGGLVQ | EIVMTQSPATLS | FTFDDYA | ASITSSS | CARERV | RASQN | DATTR | CQQYY |
| | PGGSLRLSCAASG | VSPGERATLSCR | MH (SEQ | AFIDYA | LWNSYF | VNNNL | AT | TWPQT |
| | FTFDDYAMHWVRQ | ASQNVNNNLAWY | ID NO: | (SEQ ID | DLW | A | (SEQ | F |
| | APGKGLEWVASIT | QQKPGQAPRLLI | 135) | NO: | (SEQ | (SEQ | ID | (SEQ |
| | SSSAFIDYADSVK | YDATTRATGIPA | | 381) | ID NO: | ID | NO: | ID |
| | GRFTISRDNSKNT | RFSGSGSGTEFT | | | 888) | NO: | 896) | NO: |
| | LYLQMNSLRAEDT | LTISSLQSEDFA | | | | 895) | | 905) |
| | AVYYCARERVLWN | VYYCQQYYTWPQ | | | | | | |
| | SYFDLWGQGTLVT | TFGQGTKVEIK | | | | | | |
| | VSS (SEQ ID | (SEQ ID NO: | | | | | | |
| | NO: 676) | 685) | | | | | | |
| MIAB23 | EVQLLESGGGLVQ | EIVMTQSPATLS | FTFDDYA | ASITSSS | CARERV | RASQN | DATTR | CQQYY |
| | PGGSLRLSCAASG | VSPGERATLSCR | MH (SEQ | AFIDYA | LWNSYF | VNNNL | AT | HYPQT |
| | FTFDDYAMHWVRQ | ASQNVNNNLAWY | ID NO: | (SEQ ID | DLW | A | (SEQ | F |
| | APGKGLEWVASIT | QQKPGQAPRLLI | 135) | NO: | (SEQ | (SEQ | ID | (SEQ |
| | SSSAFIDYADSVK | YDATTRATGIPA | | 381) | ID NO: | ID | NO: | ID |
| | GRFTISRDNSKNT | RFSGSGSGTEFT | | | 888) | NO: | 896) | NO: |
| | LYLQMNSLRAEDT | LTISSLQSEDFA | | | | 895) | | 906) |
| | AVYYCARERVLWN | VYYCQQYYHYPQ | | | | | | |
| | SYFDLWGQGTLVT | TFGQGTKVEIK | | | | | | |
| | VSS (SEQ ID | (SEQ ID NO: | | | | | | |
| | NO: 676) | 686) | | | | | | |
| MIAB24 | EVQLLESGGGLVQ | EIVMTQSPATLS | FTFDDYA | ASITSSS | CARERV | RASQN | DATTR | CQQYY |
| | PGGSLRLSCAASG | VSPGERATLSCR | MH (SEQ | AFIDYA | LWNSYF | VNNNL | AT | HWPPT |
| | FTFDDYAMHWVRQ | ASQNVNNNLAWY | ID NO: | (SEQ ID | DLW | A | (SEQ | F |
| | APGKGLEWVASIT | QQKPGQAPRLLI | 135) | NO: | (SEQ | (SEQ | ID | (SEQ |
| | SSSAFIDYADSVK | YDATTRATGIPA | | 381) | ID NO: | ID | NO: | ID |
| | GRFTISRDNSKNT | RFSGSGSGTEFT | | | 888) | NO: | 896) | NO: |
| | LYLQMNSLRAEDT | LTISSLQSEDFA | | | | 895) | | 907) |
| | AVYYCARERVLWN | VYYCQQYYHWPP | | | | | | |
| | SYFDLWGQGTLVT | TFGQGTKVEIK | | | | | | |
| | VSS (SEQ ID | (SEQ ID NO: | | | | | | |
| | NO: 676) | 687) | | | | | | |
| MIAB25 | EVQLLESGGGLVQ | EIVMTQSPATLS | FIFDDYA | ASITSSS | CARERV | RASQS | DASTR | CQQYS |
| | PGGSLRLSCAASG | VSPGERATLSCR | MH (SEQ | AFIDYA | DWFSYF | VSNNL | AT | HWPPT |
| | FIFDDYAMHWVRQ | ASQSVSNNLVWY | ID NO: | (SEQ ID | DLW | V | (SEQ | F |
| | APGKGLEWVASIT | QQKPGQAPRLLI | 908) | NO: | (SEQ | (SEQ | ID | (SEQ |
| | SSSAFIDYADSVK | YDASTRATGIPA | | 381) | ID NO: | ID | NO: | ID |
| | GRFTISRDNSKNT | RFSGSGSGTEFT | | | 909) | NO: | 904) | NO: |
| | LYLQMNSLRAEDT | LTISSLQSEDFA | | | | 910) | | 911) |
| | AVYYCARERVDWF | VYYCQQYSHWPP | | | | | | |
| | SYFDLWGQGTLVT | TFGQGTKVEIK | | | | | | |
| | VSS (SEQ ID | (SEQ ID NO: | | | | | | |
| | NO: 688) | 689) | | | | | | |
| MIAB26 | EVQLLESGGGLVQ | EIVMTQSPATLS | FTFDDYA | ASITSSS | CARERV | RASQS | RASTR | CQQYH |
| | PGGSLRLSCAASG | VSPGERATLSCR | MH (SEQ | AFIDYA | DWNSYF | VYSNL | AT | IWPPT |
| | FTFDDYAMHWVRQ | ASQSVYSNLAWY | ID NO: | (SEQ ID | DLW | A | (SEQ | F |
| | APGKGLEWVASIT | QQKPGQAPRLLI | 135) | NO: | (SEQ | (SEQ | ID | (SEQ |
| | SSSAFIDYADSVK | YRASTRATGIPA | | 381) | ID NO: | ID | NO: | ID |
| | GRFTISRDNSKNT | RFSGSGSGTEFT | | | 382) | NO: | 913) | NO: |
| | LYLQMNSLRAEDT | LTISSLQSEDFA | | | | 912) | | 914) |
| | AVYYCARERVDWN | VYYCQQYHIWPP | | | | | | |
| | SYFDLWGQGTLVT | TFGQGTKVEIK | | | | | | |
| | VSS (SEQ ID | (SEQ ID NO: | | | | | | |
| | NO: 664) | 690) | | | | | | |
| MIAB27 | EVQLLESGGGLVQ | EIVMTQSPATLS | FAFSNFA | TITSSGG | KARERV | RASQS | DASSR | CQQYS |
| | PGGSLRLSCAASG | VSPGERATLSCR | MS (SEQ | STDYA | DWNSYF | VTSDL | AM | TWPPT |
| | FAFSNFAMSWVRQ | ASQSVTSDLAWY | ID NO: | (SEQ ID | NLW | A | (SEQ | F |
| | APGKGLEWSTITS | QQKPGQAPRLLI | 915) | NO: | (SEQ | (SEQ | ID | (SEQ |
| | SGGSTDYADSVKG | YDASSRAMGIPA | | 916) | ID NO: | ID | NO: | ID |
| | RFTISRDNSKNTL | RFSGSGSGTEFT | | | 917) | NO: | 919) | NO: |
| | YLQMNSLRAEDTA | LTISSLQSEDFA | | | | 918) | | 920) |
| | VYYKARERVDWNS | VYYCQQYSTWPP | | | | | | |
| | YFNLWGQGTLVTV | TFGQGTKVEIK | | | | | | |
| | SS (SEQ ID | (SEQ ID NO: | | | | | | |
| | NO: 691) | 692) | | | | | | |
| MIAB28 | EVQLLESGGGLVQ | EIVMTQSPATLS | FTFSSFA | SISSSGS | CIRERV | RASQS | GESTR | CQQYY |
| | PGGSLRLSCAASG | VSPGERATLSCR | LS (SEQ | GGSTNYA | DWNSYF | VTRNL | AT | NWPPS |
| | FTFSSFALSWVRQ | ASQSVTRNLAWY | ID NO: | (SEQ ID | DLW | A | (SEQ | F |
| | APGKGLEWSSISS | QQKPGQAPRLLI | 921) | NO: | (SEQ | (SEQ | ID | (SEQ |
| | SGSGGSTNYADSV | YGESTRATGIPA | | 922) | ID NO: | ID | NO: | ID |
| | KGRFTISRDNSKN | RFSGSGSGTEFT | | | 923) | NO: | 925) | NO: |
| | TLYLQMNSLRAED | LTISSLQSEDFA | | | | 924) | | 926) |
| | TAVYYCIRERVDW | VYYCQQYYNWPP | | | | | | |
| | NSYFDLWGQGTLV | SFGQGTKVEIK | | | | | | |
| | TVSS (SEQ ID | (SEQ ID NO: | | | | | | |
| | NO: 693) | 694 | | | | | | |
| MIAB29 | EVQLLESGGGLVQ | EIVMTQSPATLS | FTFNDYA | SISSSGG | CAREKV | RASQS | GTSNR | CQQYY |
| | PGGSLRLSCAASG | VSPGERATLSCR | MT (SEQ | SIDYA | DWNSYF | VSNTL | AA | TTPLT |
| | FTFNDYAMTWVRQ | ASQSVSNTLAWY | ID NO: | (SEQ ID | DLW | A | (SEQ | F |
| | APGKGLEWASISS | QQKPGQAPRLLI | 927) | NO: | (SEQ | (SEQ | ID | (SEQ |
| | SGGSIDYADSVKG | YGTSNRAAGIPA | | 928 | ID NO: | ID | NO: | ID |
| | RFTISRDNSKNTL | RFSGSGSGTEFT | | | 929) | NO: | 931) | NO: |
| | YLQMNSLRAEDTA | LTISSLQSEDFA | | | | 930) | | 932) |
| | VYYCAREKVDWNS | VYYCQQYYTTPL | | | | | | |
| | YFDLWGQGTLVTV | TFGQGTKVEIK | | | | | | |
| | SS (SEQ ID | (SEQ ID NO: | | | | | | |
| | NO: 695) | 696) | | | | | | |
| MIAB30 | EVQLLESGGGLVQ | EIVMTQSPATLS | FTFSDYA | AISTSGG | CARERV | RASQS | GASTG | CQQYN |
| | PGGSLRLSCAASG | VSPGERATLSCR | MT (SEQ | STYYV | DWNSYF | VISNL | AT | NRPPT |
| | FTFSDYAMTWVRQ | ASQSVISNLAWY | ID NO: | (SEQ ID | DLW | A | (SEQ | F |
| | APGKGLEWSAIST | QQKPGQAPRLLI | 933) | NO: | (SEQ | (SEQ | ID | (SEQ |
| | SGGSTYYVDSVKG | YGASTGATGIPA | | 934) | ID NO: | ID | NO: | ID |
| | RFTISRDNSKNTL | RFSGSGSGTEFT | | | 382) | NO: | 936) | NO: |
| | YLQMNSLRAEDTA | LTISSLQSEDFA | | | | 935) | | 937) |
| | VYYCARERVDWNS | VYYCQQYNNRPP | | | | | | |
| | YFDLWGQGTLVTV | TFGQGTKVEIK | | | | | | |
| | SS (SEQ ID | (SEQ ID NO: | | | | | | |
| | NO: 697) | 698) | | | | | | |
| MIAB31 | EVQLLESGGGLVQ | EIVMTQSPATLS | LTFSSHA | AITGSGG | CARERS | RASQS | GASTR | CQQYN |
| | PGGSLRLSCAASG | VSPGERATLSCR | MS (SEQ | NTYYA | DWNSYF | VDNNL | DT | YWPPT |
| | LTFSSHAMSWVRQ | ASQSVDNNLAWY | ID NO: | (SEQ ID | DLH | A | (SEQ | F |
| | APGKGLEWAAITG | QQKPGQAPRLLI | 938) | NO: | (SEQ | (SEQ | ID | (SEQ |
| | SGGNTYYADSVKG | YGASTRDTGIPA | | 939) | ID NO: | ID | NO: | ID |
| | RFTISRDNSKNTL | RFSGSGSGTEFT | | | 940) | NO: | 942) | NO: |
| | YLQMNSLRAEDTA | LTISSLQSEDFA | | | | 941) | | 943) |
| | VYYCARERSDWNS | VYYCQQYNYWPP | | | | | | |
| | YFDLHGQGTLVTV | TFGQGTKVEIK | | | | | | |
| | SS (SEQ ID | (SEQ ID NO: | | | | | | |
| | NO: 699) | 700) | | | | | | |
| MIAB32 | EVQLLESGGGLVQ | EIVMTQSPATLS | FTFDDYA | ASITSSS | CARERV | RASQS | DVSTR | CQQYS |
| | PGGSLRLSCAASG | VSPGERATLSCR | MH (SEQ | AFIDYA | DWWSYF | ISNNL | AT | LWPPT |
| | FTFDDYAMHWVRQ | ASQSISNNLAWY | ID NO: | (SEQ ID | DLW | A | (SEQ | F |
| | APGKGLEWVASIT | QQKPGQAPRLLI | 135) | NO: | (SEQ | (SEQ | ID | (SEQ |
| | SSSAFIDYADSVK | YDVSTRATGIPA | | 381) | ID NO: | ID | NO: | ID |
| | GRFTISRDNSKNT | RFSGSGSGTEFT | | | 944) | NO: | 946) | NO: |
| | LYLQMNSLRAEDT | LTISSLQSEDFA | | | | 945) | | 947) |
| | AVYYCARERVDWW | VYYCQQYSLWPP | | | | | | |
| | SYFDLWGQGTLVT | TFGQGTKVEIK | | | | | | |
| | VSS (SEQ ID | (SEQ ID NO: | | | | | | |
| | NO: 701) | 702) | | | | | | |
| MIAB33 | EVQLLESGGGLVQ | EIVMTQSPATLS | FTLSSYG | SITGSGD | CARERV | RASRS | DAFTR | CQQYD |
| | PGGSLRLSCAASG | VSPGERATLSCR | MS (SEQ | TSYYA | DWNSYF | ISSNL | AT | TWPET |
| | FTLSSYGMSWVRQ | ASRSISSNLAWY | ID NO: | (SEQ ID | DRW | A | (SEQ | F |
| | APGKGLEWASITG | QQKPGQAPRLLI | 948) | NO: | (SEQ | (SEQ | ID | (SEQ |
| | SGDTSYYADSVKG | YDAFTRATGIPA | | 949) | ID NO: | ID | NO: | ID |
| | RFTISRDNSKNTL | RFSGSGSGTEFT | | | 950) | NO: | 952) | NO: |
| | YLQMNSLRAEDTA | LTISSLQSEDFA | | | | 951) | | 953) |
| | VYYCARERVDWNS | VYYCQQYDTWPE | | | | | | |
| | YFDRWGQGTLVTV | TFGQGTKVEIK | | | | | | |
| | SS (SEQ ID | (SEQ ID NO: | | | | | | |
| | NO: 703) | 704) | | | | | | |
| MIAB34 | EVQLLESGGGLVQ | EIVMTQSPATLS | FTFSTYV | SISYSGG | CARERV | RASQS | DVSIR | CQQYT |
| | PGGSLRLSCAASG | VSPGERATLSCR | MT (SEQ | FIYYA | MWNSYF | VSVNL | AT | TWPPT |
| | FTFSTYVMTWVRQ | ASQSVSVNLAWY | ID NO: | (SEQ ID | DLW | A | (SEQ | F |
| | APGKGLEWASISY | QQKPGQAPRLLI | 954) | NO: | (SEQ | (SEQ | ID | (SEQ |
| | SGGFIYYADSVKG | YDVSIRATGIPA | | 955) | ID NO: | ID | NO: | ID |
| | RFTISRDNSKNTL | RFSGSGSGTEFT | | | 956) | NO: | 958) | NO: |
| | YLQMNSLRAEDTA | LTISSLQSEDFA | | | | 957) | | 959) |
| | VYYCARERVMWNS | VYYCQQYTTWPP | | | | | | |
| | YFDLWGQGTLVTV | TFGQGTKVEIK | | | | | | |
| | SS (SEQ ID | (SEQ ID NO: | | | | | | |
| | NO: 705) | 706) | | | | | | |
| MIAB35 | EVQLLESGGGLVQ | EIVMTQSPATLS | FTFDDYA | ASITSSS | CNRERV | RASQS | DTSSR | CQQYH |
| | PGGSLRLSCAASG | VSPGERATLSCR | MH (SEQ | AFIDYA | DWNSYF | VNNYL | AT | SWPPT |
| | FTFDDYAMHWVRQ | ASQSVNNYLAWY | ID NO: | (SEQ ID | DLW | A | (SEQ | F |
| | APGKGLEWVASIT | QQKPGQAPRLLI | 135) | NO: | (SEQ | (SEQ | ID | (SEQ |
| | SSSAFIDYADSVK | YDTSSRATGIPA | | 381) | ID NO: | ID | NO: | ID |
| | GRFTISRDNSKNT | RFSGSGSGTEFT | | | 960) | NO: | 962) | NO: |
| | LYLQMNSLRAEDT | LTISSLQSEDFA | | | | 961) | | 963) |
| | AVYYCNRERVDWN | VYYCQQYHSWPP | | | | | | |
| | SYFDLWGQGTLVT | TFGQGTKVEIK | | | | | | |
| | VSS (SEQ ID | (SEQ ID NO: | | | | | | |
| | NO: 707) | 708) | | | | | | |
| MIAB36 | EVQLLESGGGLVQ | EIVMTQSPATLS | FIFSDYA | AISGSGG | CAREMV | RASQS | SASTR | CQQYY |
| | PGGSLRLSCAASG | VSPGERATLSCR | MS (SEQ | STYYT | DWNSYF | ITTNL | AT | DWPFT |
| | FIFSDYAMSWVRQ | ASQSITTNLAWY | ID NO: | (SEQ ID | DLW | A | (SEQ | F |
| | APGKGLEWSAISG | QQKPGQAPRLLI | 964) | NO: | (SEQ | (SEQ | ID | (SEQ |
| | SGGSTYYTDSVKG | YSASTRATGIPA | | 965) | ID NO: | ID | NO: | ID |
| | RFTISRDNSKNTL | RFSGSGSGTEFT | | | 966) | NO: | 968) | NO: |
| | YLQMNSLRAEDTA | LTISSLQSEDFA | | | | 967) | | 969) |
| | VYYCAREMVDWNS | VYYCQQYYDWPF | | | | | | |
| | YFDLWGQGTLVTV | TFGQGTKVEIK | | | | | | |
| | SS (SEQ ID | (SEQ ID NO: | | | | | | |
| | NO: 709) | 710) | | | | | | |
| MIAB37 | EVQLLESGGGLVQ | EIVMTQSPATLS | FTFDDYA | ASITSSS | CAQERV | RASQG | GASTR | CQQYY |
| | PGGSLRLSCAASG | VSPGERATLSCR | MH (SEQ | AFIDYA | DWNSYF | ISNSY | AT | TYPPT |
| | FTFDDYAMHWVRQ | ASQGISNSYLAW | ID NO: | (SEQ ID | DLW | LA | (SEQ | F |
| | APGKGLEWVASIT | YQQKPGQAPRLL | 135) | NO: | (SEQ | (SEQ | ID | (SEQ |
| | SSSAFIDYADSVK | IYGASTRATGIP | | 381) | ID NO: | ID | NO: | ID |
| | GRFTISRDNSKNT | ARFSGSGSGTEF | | | 970) | NO: | 241) | NO: |
| | LYLQMNSLRAEDT | TLTISSLQSEDF | | | | 383) | | 652) |
| | AVYYCAQERVDWN | AVYYCQQYYTYP | | | | | | |
| | SYFDLWGQGTLVT | PTFGQGTKVEIK | | | | | | |
| | VSS (SEQ ID | (SEQ ID NO: | | | | | | |
| | NO: 711) | 663) | | | | | | |
| MIAB38 | EVQLLESGGGLVQ | EIVMTQSPATLS | FTFRNYA | SISSSGG | CARERV | RASQS | DVSTR | CQQYK |
| | PGGSLRLSCAASG | VSPGERATLSCR | MT (SEQ | STYYA | DYNSYF | IGNNL | AT | HWPPT |
| | FTFRNYAMTWVRQ | ASQSIGNNLAWY | ID NO: | (SEQ ID | DLW | A | (SEQ | F |
| | APGKGLEWSSISS | QQKPGQAPRLLI | 971) | NO: | (SEQ | (SEQ | ID | (SEQ |
| | SGGSTYYADSVKG | YDVSTRATGIPA | | 972) | ID NO: | ID | NO: | ID |
| | RFTISRDNSKNTL | RFSGSGSGTEFT | | | 973) | NO: | 946) | NO: |
| | YLQMNSLRAEDTA | LTISSLQSEDFA | | | | 974) | | 975) |
| | VYYCARERVDYNS | VYYCQQYKHWPP | | | | | | |
| | YFDLWGQGTLVTV | TFGQGTKVEIK | | | | | | |
| | SS (SEQ ID | (SEQ ID NO: | | | | | | |
| | NO: 712) | 713) | | | | | | |
| MIAB39 | EVQLLESGGGLVQ | EIVMTQSPATLS | FTLRNYA | AISGSGG | CDRERV | RASQS | ASSTR | CQQYN |
| | PGGSLRLSCAASG | VSPGERATLSCR | MS (SEQ | STSYA | DWNSYF | VSNNV | AT | TWPFT |
| | FTLRNYAMSWVRQ | ASQSVSNNVAWY | ID NO: | (SEQ ID | DLW | A | (SEQ | F |
| | APGKGLEWSAISG | QQKPGQAPRLLI | 976) | NO: | (SEQ | (SEQ | ID | (SEQ |
| | SGGSTSYADSVKG | YASSTRATGIPA | | 978) | ID NO: | ID | NO: | ID |
| | RFTISRDNSKNTL | RFSGSGSGTEFT | | | 979) | NO: | 981) | NO: |
| | YLQMNSLRAEDTA | LTISSLQSEDFA | | | | 980) | | 982) |
| | VYYCDRERVDWNS | VYYCQQYNTWPF | | | | | | |
| | YFDLWGQGTLVTV | TFGQGTKVEIK | | | | | | |
| | SS (SEQ ID | (SEQ ID NO: | | | | | | |
| | NO: 714) | 715) | | | | | | |
| MIAB40 | EVQLLESGGGLVQ | EIVMTQSPATLS | FTFDTYA | GISGSGG | CARERV | RASQS | GASTR | CQQYY |
| | PGGSLRLSCAASG | VSPGERATLSCR | MN (SEQ | SPYYA | LWNSYF | FSSNL | ST | DWPIT |
| | FTFDTYAMNWVRQ | ASQSFSSNLAWY | ID NO: | (SEQ ID | DLW | A | (SEQ | F |
| | APGKGLEWFGISG | QQKPGQAPRLLI | 983) | NO: | (SEQ | (SEQ | ID | (SEQ |
| | SGGSPYYADSVKG | YGASTRSTGIPA | | 984) | ID NO: | ID | NO: | ID |
| | RFTISRDNSKNTL | RFSGSGSGTEFT | | | 888) | NO: | 986) | NO: |
| | YLQMNSLRAEDTA | LTISSLQSEDFA | | | | 985) | | 987) |
| | VYYCARERVLWNS | VYYCQQYYDWPI | | | | | | |
| | YFDLWGQGTLVTV | TFGQGTKVEIK | | | | | | |
| | SS (SEQ ID | (SEQ ID NO: | | | | | | |
| | NO: 716) | 717) | | | | | | |
| MIAB41 | EVQLLESGGGLVQ | EIVMTQSPATLS | FTFSDYA | TISGSGG | CERERV | RASQS | DASSR | CQQYY |
| | PGGSLRLSCAASG | VSPGERATLSCR | LS (SEQ | NTYYA | DWNSYF | IRNNL | AT | IWPLT |
| | FTFSDYALSWVRQ | ASQSIRNNLAWY | ID NO: | (SEQ ID | DLW | A | (SEQ | F |
| | APGKGLEWSTISG | QQKPGQAPRLLI | 988) | NO: | (SEQ | SEQ | ID | (SEQ |
| | SGGNTYYADSVKG | YDASSRATGIPA | | 989) | ID NO: | ID | NO: | ID |
| | RFTISRDNSKNTL | RFSGSGSGTEFT | | | 990) | NO: | 992) | NO: |
| | YLQMNSLRAEDTA | LTISSLQSEDFA | | | | 991) | | 993) |
| | VYYCERERVDWNS | VYYCQQYYIWPL | | | | | | |
| | YFDLWGQGTLVTV | TFGQGTKVEIK | | | | | | |
| | SS (SEQ ID | (SEQ ID NO: | | | | | | |
| | NO: 718) | 719) | | | | | | |
| MIAB42 | EVQLLESGGGLVQ | EIVMTQSPATLS | FTFSSSA | AISGSGG | CAREVV | RASQS | GASTT | CQQYS |
| | PGGSLRLSCAASG | VSPGERATLSCR | MS (SEQ | STYYT | DWNSYF | ISSDL | AT | TWPLT |
| | FTFSSSAMSWVRQ | ASQSISSDLAWY | ID NO: | (SEQ ID | DLW | A | (SEQ | F |
| | APGKGLEWSAISG | QQKPGQAPRLLI | 994) | NO: | (SEQ | (SEQ | ID | (SEQ |
| | SGGSTYYTDSVKG | YGASTTATGIPA | | 965) | ID NO: | ID | NO: | ID |
| | RFTISRDNSKNTL | RFSGSGSGTEFT | | | 995) | NO: | 997) | NO: |
| | YLQMNSLRAEDTA | LTISSLQSEDFA | | | | 996) | | 998) |
| | VYYCAREVVDWNS | VYYCQQYSTWPL | | | | | | |
| | YFDLWGQGTLVTV | TFGQGTKVEIK | | | | | | |
| | SS (SEQ ID | (SEQ ID NO: | | | | | | |
| | NO: 720) | 721) | | | | | | |
| MIAB43 | EVQLLESGGGLVQ | EIVMTQSPATLS | FTFSTHA | TISGSGA | CARETV | RASQS | DASTR | CQQYN |
| | PGGSLRLSCAASG | VSPGERATLSCR | MT (SEQ | TTEYA | DWNSYF | VSNDL | VT | HWPPT |
| | FTFSTHAMTWVRQ | ASQSVSNDLAWY | ID NO: | (SEQ ID | DLW | A | (SEQ | F |
| | APGKGLEWSTISG | QQKPGQAPRLLI | 999) | NO: | (SEQ | (SEQ | ID | (SEQ |
| | SGATTEYADSVKG | YDASTRVTGIPA | | 1000) | ID NO: | ID | NO: | ID |
| | RFTISRDNSKNTL | RFSGSGSGTEFT | | | 1001) | NO: | 887) | NO: |
| | YLQMNSLRAEDTA | LTISSLQSEDFA | | | | 1002) | | 1003) |
| | VYYCARETVDWNS | VYYCQQYNHWPP | | | | | | |
| | YFDLWGQGTLVTV | TFGQGTKVEIK | | | | | | |
| | SS (SEQ ID | (SEQ ID NO: | | | | | | |
| | NO: 722) | 723) | | | | | | |
| MIAB44 | EVQLLESGGGLVQ | EIVMTQSPATLS | FTFSNYP | SISWSGG | CAREHV | RASQN | DASTT | CQQYD |
| | PGGSLRLSCAASG | VSPGERATLSCR | MT (SEQ | SIDYD | DWNSYF | VRSNL | AT | TWPLT |
| | FTFSNYPMTWVRQ | ASQNVRSNLAWY | ID NO: | (SEQ ID | DLW | A | (SEQ | F |
| | APGKGLEWSSISW | QQKPGQAPRLLI | 1004) | NO: | (SEQ | (SEQ | ID | (SEQ |
| | SGGSIDYDDSVKG | YDASTTATGIPA | | 1005) | ID NO: | ID | NO: | ID |
| | RFTISRDNSKNTL | RFSGSGSGTEFT | | | 1006) | NO: | 1008) | NO: |
| | YLQMNSLRAEDTA | LTISSLQSEDFA | | | | 1007) | | 1009) |
| | VYYCAREHVDWNS | VYYCQQYDTWPL | | | | | | |
| | YFDLWGQGTLVTV | TFGQGTKVEIK | | | | | | |
| | SS (SEQ ID | (SEQ ID NO: | | | | | | |
| | NO: 724) | 725 | | | | | | |
| MIAB45 | EVQLLESGGGLVQ | EIVMTQSPATLS | FTFRDYA | SISGSGG | CARERV | RASQS | AASTR | CQQYG |
| | PGGSLRLSCAASG | VSPGERATLSCR | MS (SEQ | SIDYA | DWNSYF | VSSLL | AT | TWPQT |
| | FTFRDYAMSWVRQ | ASQSVSSLLAWY | ID NO: | (SEQ ID | DAW | A | (SEQ | F |
| | APGKGLEWSSISG | QQKPGQAPRLLI | 1010) | NO: | (SEQ | (SEQ | ID | (SEQ |
| | SGGSIDYADSVKG | YAASTRATGIPA | | 1011) | ID NO: | ID | NO: | ID |
| | RFTISRDNSKNTL | RFSGSGSGTEFT | | | 1012) | NO: | 1014) | NO: |
| | YLQMNSLRAEDTA | LTISSLQSEDFA | | | | 1013) | | 1015) |
| | VYYCARERVDWNS | VYYCQQYGTWPQ | | | | | | |
| | YFDAWGQGTLVTV | TFGQGTKVEIK | | | | | | |
| | SS (SEQ ID | (SEQ ID NO: | | | | | | |
| | NO: 726) | 727) | | | | | | |
| MIAB46 | EVQLLESGGGLVQ | EIVMTQSPATLS | FTLSSYA | GISGSGG | CARIRV | RASQS | DVSTR | CQQYN |
| | PGGSLRLSCAASG | VSPGERATLSCR | MS (SEQ | RTYYA | DWNSYF | FSSNL | AT | HWPPT |
| | FTLSSYAMSWVRQ | ASQSFSSNLAWY | ID NO: | (SEQ ID | DLW | A | (SEQ | F |
| | APGKGLEWAGISG | QQKPGQAPRLLI | 1016) | NO: | (SEQ | (SEQ | ID | (SEQ |
| | SGGRTYYADSVKG | YDVSTRATGIPA | | 1017) | ID NO: | ID | NO: | ID |
| | RFTISRDNSKNTL | RFSGSGSGTEFT | | | 1018) | NO: | 946) | NO: |
| | YLQMNSLRAEDTA | LTISSLQSEDFA | | | | 985) | | 1003) |
| | VYYCARIRVDWNS | VYYCQQYNHWPP | | | | | | |
| | YFDLWGQGTLVTV | TFGQGTKVEIK | | | | | | |
| | SS (SEQ ID | (SEQ ID NO: | | | | | | |
| | NO: 728) | 729) | | | | | | |
| MIAB47 | EVQLLESGGGLVQ | EIVMTQSPATLS | FTFNNYA | AISGSGG | CARERL | RASQT | DAFTR | CQQYG |
| | PGGSLRLSCAASG | VSPGERATLSCR | MN (SEQ | RTHYA | DINSYF | VSSNL | AT | TWPLT |
| | FTFNNYAMNWVRQ | ASQTVSSNLAWY | ID NO: | (SEQ ID | DLW | A | (SEQ | F |
| | APGKGLEWSAISG | QQKPGQAPRLLI | 1019) | NO: | (SEQ | (SEQ | ID | (SEQ |
| | SGGRTHYADSVKG | YDAFTRATGIPA | | 1020) | ID NO: | ID | NO: | ID |
| | RFTISRDNSKNTL | RFSGSGSGTEFT | | | 1021) | NO: | 952) | NO: |
| | YLQMNSLRAEDTA | LTISSLQSEDFA | | | | 1022) | | 1023) |
| | VYYCARERLDINS | VYYCQQYGTWPL | | | | | | |
| | YFDLWGQGTLVTV | TFGQGTKVEIK | | | | | | |
| | SS (SEQ ID | (SEQ ID NO: | | | | | | |
| | NO: 730) | 731) | | | | | | |
| MIAB48 | EVQLLESGGGLVQ | EIVMTQSPATLS | FTFDDYA | ASITSSS | CARERV | RASQS | GASTT | CQQYH |
| | PGGSLRLSCAASG | VSPGERATLSCR | MH (SEQ | AFIDYA | DWLSYF | VYSNL | AT | NWPPT |
| | FTFDDYAMHWVRQ | ASQSVYSNLAWY | ID NO: | (SEQ ID | DLW | A | (SEQ | F |
| | APGKGLEWVASIT | QQKPGQAPRLLI | 135) | NO: | (SEQ | (SEQ | ID | (SEQ |
| | SSSAFIDYADSVK | YGASTTATGIPA | | 381) | ID NO: | ID | NO: | ID |
| | GRFTISRDNSKNT | RFSGSGSGTEFT | | | 1024) | NO: | 997) | NO: |
| | LYLQMNSLRAEDT | LTISSLQSEDFA | | | | 912) | | 1025) |
| | AVYYCARERVDWL | VYYCQQYHNWPP | | | | | | |
| | SYFDLWGQGTLVT | TFGQGTKVEIK | | | | | | |
| | VSS (SEQ ID | (SEQ ID NO: | | | | | | |
| | NO: 732) | 733) | | | | | | |
| MIAB49 | EVQLLESGGGLVQ | EIVMTQSPATLS | LTFSSYA | AISGTGG | CARERV | RASQG | YASTR | CQQYS |
| | PGGSLRLSCAASG | VSPGERATLSCR | MN (SEQ | STYYA | DWNNYF | ISNSY | AT | DWPPT |
| | LTFSSYAMNWVRQ | ASQGISNSYLAW | ID NO: | (SEQ ID | DLW | LA | (SEQ | F |
| | APGKGLEWSAISG | YQQKPGQAPRLL | 1026) | NO: | (SEQ | (SEQ | ID | (SEQ |
| | TGGSTYYADSVKG | IYYASTRATGIP | | 1027) | ID NO: | ID | NO: | ID |
| | RFTISRDNSKNTL | ARFSGSGSGTEF | | | 1028) | NO: | 1029) | NO: |
| | YLQMNSLRAEDTA | TLTISSLQSEDF | | | | 383) | | 1030) |
| | VYYCARERVDWNN | AVYYCQQYSDWP | | | | | | |
| | YFDLWGQGTLVTV | PTFGQGTKVEIK | | | | | | |
| | SS (SEQ ID | (SEQ ID NO: | | | | | | |
| | NO: 734) | 735) | | | | | | |
| MIAB50 | EVQLLESGGGLVQ | EIVMTQSPATLS | FTFTTYA | AISGSGS | CARERV | RASQS | GASIR | CQQYY |
| | PGGSLRLSCAASG | VSPGERATLSCR | LS (SEQ | NTYYA | DWNVYF | VGTDL | AI | KWPET |
| | FTFTTYALSWVRQ | ASQSVGTDLAWY | ID NO: | (SEQ ID | DLW | A | (SEQ | F |
| | APGKGLEWAAISG | QQKPGQAPRLLI | 1031) | NO: | (SEQ | (SEQ | ID | (SEQ |
| | SGSNTYYADSVKG | YGASIRAIGIPA | | 1032) | ID NO: | ID | NO: | ID |
| | RFTISRDNSKNTL | RFSGSGSGTEFT | | | 1033) | NO: | 1035) | NO: |
| | YLQMNSLRAEDTA | LTISSLQSEDFA | | | | 1034) | | 1036) |
| | VYYCARERVDWNV | VYYCQQYYKWPE | | | | | | |
| | YFDLWGQGTLVTV | TFGQGTKVEIK | | | | | | |
| | SS (SEQ ID | (SEQ ID NO: | | | | | | |
| | NO: 736) | 737) | | | | | | |
| MIAB51 | EVQLLESGGGLVQ | EIVMTQSPATLS | LTFSNYA | AISSSSG | CAREHV | RASQS | DVSIR | CQQYY |
| | PGGSLRLSCAASG | VSPGERATLSCR | MA (SEQ | GTFYA | DWNSYF | VSSNL | AT | VWPDT |
| | LTFSNYAMAWVRQ | ASQSVSSNLAWY | ID NO: | (SEQ ID | DLW | A | (SEQ | F |
| | APGKGLEWAAISS | QQKPGQAPRLLI | 1037) | NO: | (SEQ | (SEQ | ID | (SEQ |
| | SSGGTFYADSVKG | YDVSIRATGIPA | | 1038) | ID NO: | ID | NO: | ID |
| | RFTISRDNSKNTL | RFSGSGSGTEFT | | | 1006) | NO: | 958) | NO: |
| | YLQMNSLRAEDTA | LTISSLQSEDFA | | | | 1039) | | 1040) |
| | VYYCAREHVDWNS | VYYCQQYYVWPD | | | | | | |
| | YFDLWGQGTLVTV | TFGQGTKVEIK | | | | | | |
| | SS (SEQ ID | (SEQ ID NO: | | | | | | |
| | NO: 738) | 739) | | | | | | |
| MIAB52 | EVQLLESGGGLVQ | EIVMTQSPATLS | FAFSNHA | AISSSGG | CARERV | RASQS | GASSR | CQQYY |
| | PGGSLRLSCAASG | VSPGERATLSCR | MN (SEQ | SIDYA | IWNSYF | VSTNF | AT | KWPPL |
| | FAFSNHAMNWVRQ | ASQSVSTNFAWY | ID NO: | (SEQ ID | DLW | A | (SEQ | F |
| | APGKGLEWSAISS | QQKPGQAPRLLI | 1041) | NO: | (SEQ | (SEQ | ID | (SEQ |
| | SGGSIDYADSVKG | YGASSRATGIPA | | 1042) | ID NO: | ID | NO: | ID |
| | RFTISRDNSKNTL | RFSGSGSGTEFT | | | 1043) | NO: | 1045) | NO: |
| | YLQMNSLRAEDTA | LTISSLQSEDFA | | | | 1044) | | 1046) |
| | VYYCARERVIWNS | VYYCQQYYKWPP | | | | | | |
| | YFDLWGQGTLVTV | LFGQGTKVEIK | | | | | | |
| | SS (SEQ ID | (SEQ ID NO: | | | | | | |
| | NO: 740) | 741) | | | | | | |
| MIAB53 | EVQLLESGGGLVQ | EIVMTQSPATLS | FTFTNYA | SITGSGG | CARERD | RASQS | GASSR | CQQYK |
| | PGGSLRLSCAASG | VSPGERATLSCR | MT (SEQ | NTDYA | DWNSYF | VSRNL | VT | TLPHT |
| | FTFTNYAMTWVKQ | ASQSVSRNLAWY | ID NO: | (SEQ ID | DLW | A | (SEQ | F |
| | APGKGLEWSSITG | QQKPGQAPRLLI | 1047) | NO: | (SEQ | (SEQ | ID | (SEQ |
| | SGGNTDYADSVKG | YGASSRVTGIPA | | 1048) | ID NO: | ID | NO: | ID |
| | RFTISRDNSKNTL | RFSGSGSGTEFT | | | 1049) | NO: | 1051) | NO: |
| | YLQMNSLRAEDTA | LTISSLQSEDFA | | | | 1050) | | 1052) |
| | VYYCARERDDWNS | VYYCQQYKTLPH | | | | | | |
| | YFDLWGQGTLVTV | TFGQGTKVEIK | | | | | | |
| | SS (SEQ ID | (SEQ ID NO: | | | | | | |
| | NO: 742) | 743) | | | | | | |
| MIAB54 | EVQLLESGGGLVQ | EIVMTQSPATLS | FTFTSYA | AISGSGG | FARERV | RASQS | GASTR | CQQYY |
| | PGGSLRLSCAASG | VSPGERATLSCR | MN (SEQ | STDYA | DWNSYF | VGTNL | AT | DIPET |
| | FTFTSYAMNWVRQ | ASQSVGTNLAWY | ID NO: | (SEQ ID | DLW | A | (SEQ | F |
| | APGKGLEWSAISG | QQKPGQAPRLLI | 1053) | NO: | (SEQ | (SEQ | ID | (SEQ |
| | SGGSTDYADSVKG | YGASTRATGIPA | | 1054) | ID NO: | ID | NO: | ID |
| | RFTISRDNSKNTL | RFSGSGSGTEFT | | | 1055) | NO: | 241) | NO: |
| | YLQMNSLRAEDTA | LTISSLQSEDFA | | | | 1056) | | 1057) |
| | VYYFARERVDWNS | VYYCQQYYDIPE | | | | | | |
| | YFDLWGQGTLVTV | TFGQGTKVEIK | | | | | | |
| | SS (SEQ ID | (SEQ ID NO: | | | | | | |
| | NO: 744) | 745) | | | | | | |
| MIAB55 | EVQLLESGGGLVQ | EIVMTQSPATLS | FAFSTYA | AISGSGG | CARERV | RASQS | GASTW | CQQYT |
| | PGGSLRLSCAASG | VSPGERATLSCR | MS (SEQ | STYHA | DWNSYN | VSSYL | AT | TWPRT |
| | FAFSTYAMSWVRQ | ASQSVSSYLAWY | ID NO: | (SEQ ID | DLW | A | (SEQ | F |
| | APGKGLEWSAISG | QQKPGQAPRLLI | 1058) | NO: | (SEQ | (SEQ | ID | (SEQ |
| | SGGSTYHADSVKG | YGASTWATGIPA | | 1059) | ID NO: | ID | NO: | ID |
| | RFTISRDNSKNTL | RFSGSGSGTEFT | | | 1060) | NO: | 1062) | NO: |
| | YLQMNSLRAEDTA | LTISSLQSEDFA | | | | 1061) | | 1063) |
| | VYYCARERVDWNS | VYYCQQYTTWPR | | | | | | |
| | YNDLWGQGTLVTV | TFGQGTKVEIK | | | | | | |
| | SS (SEQ ID | (SEQ ID NO: | | | | | | |
| | NO: 746) | 747) | | | | | | |
| MIAB56 | EVQLLESGGGLVQ | EIVMTQSPATLS | FTFSNYA | GIGGSGG | CARERV | RASQT | AASNR | CQQYK |
| | PGGSLRLSCAASG | VSPGERATLSCR | MD (SEQ | STYYA | DWNSYF | VGSNL | AT | IWPPT |
| | FTFSNYAMDWVRQ | ASQTVGSNLAWY | ID NO: | (SEQ ID | YLW | A | (SEQ | F |
| | APGKGLEWSGIGG | QQKPGQAPRLLI | 1064) | NO: | (SEQ | (SEQ | ID | (SEQ |
| | SGGSTYYADSVKG | YAASNRATGIPA | | 1065) | ID NO: | ID | NO: | ID |
| | RFTISRDNSKNTL | RFSGSGSGTEFT | | | 1066) | NO: | 1068) | NO: |
| | YLQMNSLRAEDTA | LTISSLQSEDFA | | | | 1067) | | 1069) |
| | VYYCARERVDWNS | VYYCQQYKIWPP | | | | | | |
| | YFYLWGQGTLVTV | TFGQGTKVEIK | | | | | | |
| | SS (SEQ ID | (SEQ ID NO: | | | | | | |
| | NO: 748) | 749) | | | | | | |
| MIAB57 | EVQLLESGGGLVQ | EIVMTQSPATLS | FTFSNFA | VITGSGG | CAREMV | RASQS | SASTR | CQQYS |
| | PGGSLRLSCAASG | VSPGERATLSCR | MN (SEQ | STYYA | DWNSYF | VTSKL | AA | HWPPT |
| | FTFSNFAMNWVRQ | ASQSVTSKLAWY | ID NO: | (SEQ ID | DLW | A | SEQ | F |
| | APGKGLEWSVITG | QQKPGQAPRLLI | 1070) | NO: | (SEQ | (SEQ | ID | (SEQ |
| | SGGSTYYADSVKG | YSASTRAAGIPA | | 1071) | ID NO: | ID | NO: | ID |
| | RFTISRDNSKNTL | RFSGSGSGTEFT | | | 966) | NO: | 1073) | NO: |
| | YLQMNSLRAEDTA | LTISSLQSEDFA | | | | 1072) | | 911) |
| | VYYCAREMVDWNS | VYYCQQYSHWPP | | | | | | |
| | YFDLWGQGTLVTV | TFGQGTKVEIK | | | | | | |
| | SS (SEQ ID | (SEQ ID NO: | | | | | | |
| | NO: 750) | 751) | | | | | | |
| MIAB58 | EVQLLESGGGLVQ | EIVMTQSPATLS | FTFSNYA | AISTSGG | CALERA | RASQS | AASSR | CQQYD |
| | PGGSLRLSCAASG | VSPGERATLSCR | MH (SEQ | STYYA | DWNSYF | VKSNL | AT | TWPLT |
| | FTFSNYAMHWVRQ | ASQSVKSNLAWY | ID NO: | (SEQ ID | DLW | A | SEQ | F |
| | APGKGLEWSAIST | QQKPGQAPRLLI | 1074) | NO: | (SEQ | (SEQ | ID | (SEQ |
| | SGGSTYYADSVKG | YAASSRATGIPA | | 1075) | ID NO: | ID | NO: | ID |
| | RFTISRDNSKNTL | RFSGSGSGTEFT | | | 1076) | NO: | 1078) | NO: |
| | YLQMNSLRAEDTA | LTISSLQSEDFA | | | | 1077) | | 1009) |
| | VYYCALERADWNS | VYYCQQYDTWPL | | | | | | |
| | YFDLWGQGTLVTV | TFGQGTKVEIK | | | | | | |
| | SS (SEQ ID | (SEQ ID NO: | | | | | | |
| | NO: 752) | 753) | | | | | | |
| MIAB59 | EVQLLESGGGLVQ | EIVMTQSPATLS | FSFSIYA | AISGSGT | CWRERV | RASQS | DTSIR | CQQYS |
| | PGGSLRLSCAASG | VSPGERATLSCR | MS (SEQ | STYYA | DWNSYF | IGSSL | AT | HWPPT |
| | FSFSIYAMSWVRQ | ASQSIGSSLAWY | ID NO: | (SEQ ID | DLW | A | (SEQ | F |
| | APGKGLEWSAISG | QQKPGQAPRLLI | 1079) | NO: | (SEQ | (SEQ | ID | (SEQ |
| | SGTSTYYADSVKG | YDTSIRATGIPA | | 1080) | ID NO: | ID | NO: | ID |
| | RFTISRDNSKNTL | RFSGSGSGTEFT | | | 1081) | NO: | 1083) | NO: |
| | YLQMNSLRAEDTA | LTISSLQSEDFA | | | | 1082) | | 911) |
| | VYYCWRERVDWNS | VYYCQQYSHWPP | | | | | | |
| | YFDLWGQGTLVTV | TFGQGTKVEIK | | | | | | |
| | SS (SEQ ID | (SEQ ID NO: | | | | | | |
| | NO: 754) | 755) | | | | | | |
| MIAB60 | EVQLLESGGGLVQ | EIVMTQSPATLS | FSFSGYA | SITSSGG | CARERV | RASQS | GTSSR | CQQYY |
| | PGGSLRLSCAASG | VSPGERATLSCR | MS (SEQ | STYYA | DWNSYF | ITSNL | AT | IWPLT |
| | FSFSGYAMSWVRQ | ASQSITSNLAWY | ID NO: | (SEQ ID | DRW | A | (SEQ | F |
| | APGKGLEWSSITS | QQKPGQAPRLLI | 1084) | NO: | (SEQ | (SEQ | ID | (SEQ |
| | SGGSTYYADSVKG | YGTSSRATGIPA | | 1085) | ID NO: | ID | NO: | ID |
| | RFTISRDNSKNTL | RFSGSGSGTEFT | | | 950) | NO: | 1087) | NO: |
| | YLQMNSLRAEDTA | LTISSLQSEDFA | | | | 1086) | | 993) |
| | VYYCARERVDWNS | VYYCQQYYIWPL | | | | | | |
| | YFDRWGQGTLVTV | TFGQGTKVEIK | | | | | | |
| | SS (SEQ ID | (SEQ ID NO: | | | | | | |
| | NO: 756) | 757) | | | | | | |
| MIAB61 | EVQLLESGGGLVQ | EIVMTQSPATLS | FTFSRYG | AISGTGG | HARERV | RASQS | DASTR | CQQYD |
| | PGGSLRLSCAASG | VSPGERATLSCR | MS (SEQ | STYYA | DWNSYF | ISDNL | AP | IWPPT |
| | FTFSRYGMSWVRQ | ASQSISDNLAWY | ID NO: | (SEQ ID | DLW | A | (SEQ | F |
| | APGKGLEWSAISG | QQKPGQAPRLLI | 1088) | NO: | SEQ | (SEQ | ID | (SEQ |
| | TGGSTYYADSVKG | YDASTRAPGIPA | | 1027) | ID NO: | ID | NO: | ID |
| | RFTISRDNSKNTL | RFSGSGSGTEFT | | | 1089) | NO: | 1091) | NO: |
| | YLQMNSLRAEDTA | LTISSLQSEDFA | | | | 1090) | | 1092) |
| | VYYHARERVDWNS | VYYCQQYDIWPP | | | | | | |
| | YFDLWGQGTLVTV | TFGQGTKVEIK | | | | | | |
| | SS (SEQ ID | (SEQ ID NO: | | | | | | |
| | NO: 758) | 759) | | | | | | |
| MIAB62 | EVQLLESGGGLVQ | EIVMTQSPATLS | FTFSSFA | TISGSGV | CARERV | RASQS | RASIR | CQQYD |
| | PGGSLRLSCAASG | VSPGERATLSCR | LS (SEQ | NTYYA | DWNSYF | LSTNL | AT | TWPLT |
| | FTFSSFALSWVRQ | ASQSLSTNLAWY | ID NO: | (SEQ ID | DLL | A | (SEQ | F |
| | APGKGLEWSTISG | QQKPGQAPRLLI | 921) | NO: | (SEQ | (SEQ | ID | (SEQ |
| | SGVNTYYADSVKG | YRASIRATGIPA | | 1093) | ID NO: | ID | NO: | ID |
| | RFTISRDNSKNTL | RFSGSGSGTEFT | | | 1094) | NO: | 1096) | NO: |
| | YLQMNSLRAEDTA | LTISSLQSEDFA | | | | 1095) | | 1009) |
| | VYYCARERVDWNS | VYYCQQYDTWPL | | | | | | |
| | YFDLLGQGTLVTV | TFGQGTKVEIK | | | | | | |
| | SS (SEQ ID | (SEQ ID NO: | | | | | | |
| | NO: 760) | 761) | | | | | | |
| MIAB63 | EVQLLESGGGLVQ | EIVMTQSPATLS | FAFSNYA | SISSSGG | TARERV | RASQS | GASTT | CQQYY |
| | PGGSLRLSCAASG | VSPGERATLSCR | MS (SEQ | STDYA | DWNSYF | VSSDL | AT | SWPKT |
| | FAFSNYAMSWVRQ | ASQSVSSDLVWY | ID NO: | (SEQ ID | DLW | V | (SEQ | F |
| | APGKGLEWSSISS | QQKPGQAPRLLI | 1097) | NO: | SEQ | (SEQ | ID | (SEQ |
| | SGGSTDYADSVKG | YGASTTATGIPA | | 1098) | ID NO: | ID | NO: | ID |
| | RFTISRDNSKNTL | RFSGSGSGTEFT | | | 1099) | NO: | 997) | NO: |
| | YLQMNSLRAEDTA | LTISSLQSEDFA | | | | 1100) | | 1101) |
| | VYYTARERVDWNS | VYYCQQYYSWPK | | | | | | |
| | YFDLWGQGTLVTV | TFGQGTKVEIK | | | | | | |
| | SS (SEQ ID | (SEQ ID NO: | | | | | | |
| | NO: 762) | 763 | | | | | | |
| MIAB64 | EVQLLESGGGLVQ | EIVMTQSPATLS | FTFSNYA | AISSSSA | CAREHV | RASQS | SASIR | CQQYI |
| | PGGSLRLSCAASG | VSPGERATLSCR | MG (SEQ | TTNYA | DWNSYF | VRSNL | | RWPPT |
| | FTFSNYAMGWVRQ | ASQSVRSNLVWY | ID NO: | (SEQ ID | VLW | V | AT | F |
| | APGKGLEWCAISS | QQKPGQAPRLLI | 1102) | NO: | (SEQ | (SEQ | (SEQ | (SEQ |
| | SSATTNYADSVKG | YSASIRATGIPA | | 1103) | ID NO: | ID | ID | ID |
| | RFTISRDNSKNTL | RFSGSGSGTEFT | | | 1104) | NO: | NO: | NO: |
| | YLQMNSLRAEDTA | LTISSLQSEDFA | | | | 1105) | 1106) | 1107) |
| | VYYCAREHVDWNS | VYYCQQYIRWPP | | | | | | |
| | YFVLWGQGTLVTV | TFGQGTKVEIK | | | | | | |
| | SS (SEQ ID | (SEQ ID NO: | | | | | | |
| | NO: 764) | 765) | | | | | | |
| MIAB65 | EVQLLESGGGLVQ | EIVMTQSPATLS | FTFTSYT | SITSSGG | CARERV | RASQS | EASTR | CQQFY |
| | PGGSLRLSCAASG | VSPGERATLSCR | MS (SEQ | GTSYA | DWNKYF | VSDKL | AT | TWPWT |
| | FTFTSYTMSWVRQ | ASQSVSDKLAWY | ID NO: | (SEQ ID | DLW | A | (SEQ | F |
| | APGKGLEWSSITS | QQKPGQAPRLLI | 1108) | NO: | (SEQ | (SEQ | ID | (SEQ |
| | SGGGTSYADSVKG | YEASTRATGIPA | | 1109) | ID NO: | ID | NO: | ID |
| | RFTISRDNSKNTL | RFSGSGSGTEFT | | | 1110) | NO: | 1112) | NO: |
| | YLQMNSLRAEDTA | LTISSLQSEDFA | | | | 1111) | | 1113) |
| | VYYCARERVDWNK | VYYCQQFYTWPW | | | | | | |
| | YFDLWGQGTLVTV | TFGQGTKVEIK | | | | | | |
| | SS (SEQ ID | (SEQ ID NO: | | | | | | |
| | NO: 767) | 768) | | | | | | |
| MIAB66 | EVQLLESGGGLVQ | EIVMTQSPATLS | LTFSSYA | GISGSGG | CARERV | RASQS | DGSTR | CQQYN |
| | PGGSLRLSCAASG | VSPGERATLSCR | MN (SEQ | NTHYA | DWNSYF | GAGNL | AT | HWPPT |
| | LTFSSYAMNWVRQ | ASQSGAGNLAWY | ID NO: | (SEQ ID | DLE | A | (SEQ | F |
| | APGKGLEWSGISG | QQKPGQAPRLLI | 1026) | NO: | (SEQ | (SEQ | ID | (SEQ |
| | SGGNTHYADSVKG | YDGSTRATGIPA | | 1114) | ID NO: | ID | NO: | ID |
| | RFTISRDNSKNTL | RFSGSGSGTEFT | | | 1115) | NO: | 1117) | NO: |
| | YLQMNSLRAEDTA | LTISSLQSEDFA | | | | 1116) | | 1003) |
| | VYYCARERVDWNS | VYYCQQYNHWPP | | | | | | |
| | YFDLEGQGTLVTV | TFGQGTKVEIK | | | | | | |
| | SS (SEQ ID | (SEQ ID NO: | | | | | | |
| | NO: 769) | 770) | | | | | | |
| MIAB67 | EVQLLESGGGLVQ | EIVMTQSPATLS | FTLSSYG | GISGSGV | CARERV | RASQS | SASTR | CQQYS |
| | PGGSLRLSCAASG | VSPGERATLSCR | MS (SEQ | NTYYA | DWNSYD | VFSNL | AT | TWPQT |
| | FTLSSYGMSWVRQ | ASQSVFSNLAWY | ID NO: | (SEQ ID | DLW | A | (SEQ | F |
| | APGKGLEWSGISG | QQKPGQAPRLLI | 948) | NO: | (SEQ | (SEQ | ID | (SEQ |
| | SGVNTYYADSVKG | YSASTRATGIPA | | 1118) | ID NO: | ID | NO: | ID |
| | RFTISRDNSKNTL | RFSGSGSGTEFT | | | 1119) | NO: | 968) | NO: |
| | YLQMNSLRAEDTA | LTISSLQSEDFA | | | | 1120) | | 1121) |
| | VYYCARERVDWNS | VYYCQQYSTWPQ | | | | | | |
| | YDDLWGQGTLVTV | TFGQGTKVEIK | | | | | | |
| | SS (SEQ ID | (SEQ ID NO: | | | | | | |
| | NO: 771) | 772) | | | | | | |
| MIAB68 | EVQLLESGGGLVQ | EIVMTQSPATLS | FSFSTYA | SITGSGG | CARERD | RASQS | ASSTR | CQQYT |
| | PGGSLRLSCAASG | VSPGERATLSCR | MA (SEQ | LISYA | DWNSYF | VSNTL | AT | TWPYT |
| | FSFSTYAMAWVRQ | ASQSVSNTLAWY | ID NO: | (SEQ ID | DLW | A | (SEQ | F |
| | APGKGLEWASITG | QQKPGQAPRLLI | 1122) | NO: | (SEQ | (SEQ | ID | (SEQ |
| | SGGLISYADSVKG | YASSTRATGIPA | | 1123) | ID NO: | ID | NO: | ID |
| | RFTISRDNSKNTL | RFSGSGSGTEFT | | | 1049) | NO: | 981) | NO: |
| | YLQMNSLRAEDTA | LTISSLQSEDFA | | | | 930) | | 1124) |
| | VYYCARERDDWNS | VYYCQQYTTWPY | | | | | | |
| | YFDLWGQGTLVTV | TFGQGTKVEIK | | | | | | |
| | SS (SEQ ID | (SEQ ID NO: | | | | | | |
| | NO: 773) | 774) | | | | | | |
| MIAB69 | EVQLLESGGGLVQ | EIVMTQSPATLS | FTFSTYV | GISSSGG | CAREHV | RASQS | GASFR | CQQYT |
| | PGGSLRLSCAASG | VSPGERATLSCR | MT (SEQ | STYYA | DWNSYF | VSTYL | AT | TWPQT |
| | FTFSTYVMTWVRQ | ASQSVSTYLAWY | ID NO: | (SEQ ID | DLW | A | SEQ | F |
| | APGKGLEWSGISS | QQKPGQAPRLLI | 954) | NO: | (SEQ | (SEQ | ID | (SEQ |
| | SGGSTYYADSVKG | YGASFRATGIPA | | 1125) | ID NO: | ID | NO: | ID |
| | RFTISRDNSKNTL | RFSGSGSGTEFT | | | 1006) | NO: | 1127) | NO: |
| | YLQMNSLRAEDTA | LTISSLQSEDFA | | | | 1126) | | 1128) |
| | VYYCAREHVDWNS | VYYCQQYTTWPQ | | | | | | |
| | YFDLWGQGTLVTV | TFGQGTKVEIK | | | | | | |
| | SS (SEQ ID | (SEQ ID NO: | | | | | | |
| | NO: 775) | 776) | | | | | | |
| MIAB70 | EVQLLESGGGLVQ | EIVMTQSPATLS | FTFSIYA | AISSSSG | CARERV | RTSQS | ASSTR | CQQYS |
| | PGGSLRLSCAASG | VSPGERATLSCR | MS (SEQ | RTYYA | DWNSWF | ISSNL | AT | EWPPT |
| | FTFSIYAMSWVRQ | TSQSISSNLAWY | ID NO: | (SEQ ID | DLW | A | (SEQ | F |
| | APGKGLEWAAISS | QQKPGQAPRLLI | 1129) | NO: | (SEQ | (SEQ | ID | (SEQ |
| | SSGRTYYADSVKG | YASSTRATGIPA | | 1130) | ID NO: | ID | NO: | ID |
| | RFTISRDNSKNTL | RFSGSGSGTEFT | | | 1131) | NO: | 981) | NO: |
| | YLQMNSLRAEDTA | LTISSLQSEDFA | | | | 1132) | | 1133) |
| | VYYCARERVDWNS | VYYCQQYSEWPP | | | | | | |
| | WFDLWGQGTLVTV | TFGQGTKVEIK | | | | | | |
| | SS (SEQ ID | (SEQ ID NO: | | | | | | |
| | NO: 777) | 778) | | | | | | |
| MIAB71 | EVQLLESGGGLVQ | EIVMTQSPATLS | FTFSTYA | AISGSGG | CASERV | TASQS | TASIR | CQQYY |
| | PGGSLRLSCAASG | VSPGERATLSCT | MS (SEQ | STSYA | DWNSYF | VSSNL | AT | SWPKT |
| | FTFSTYAMSWVRQ | ASQSVSSNLAWY | ID NO: | (SEQ ID | DLW | A | (SEQ | F |
| | APGKGLEWSAISG | QQKPGQAPRLLI | 1134) | NO: | (SEQ | (SEQ | ID | (SEQ |
| | SGGSTSYADSVKG | YTASIRATGIPA | | 978) | ID NO: | ID | NO: | ID |
| | RFTISRDNSKNTL | RFSGSGSGTEFT | | | 1135) | NO: | 1137) | NO: |
| | YLQMNSLRAEDTA | LTISSLQSEDFA | | | | 1136) | | 1101) |
| | VYYCASERVDWNS | VYYCQQYYSWPK | | | | | | |
| | YFDLWGQGTLVTV | TFGQGTKVEIK | | | | | | |
| | SS (SEQ ID | (SEQ ID NO: | | | | | | |
| | NO: 779) | 780) | | | | | | |
| MIAB72 | EVQLLESGGGLVQ | EIVMTQSPATLS | FIFSNYG | SISGGGG | CARERV | RASQS | GASRR | CQQYY |
| | PGGSLRLSCAASG | VSPGERATLSCR | MS (SEQ | STYYA | TWNSYF | VRGNL | AT | RWPLT |
| | FIFSNYGMSWVRQ | ASQSVRGNLAWY | ID NO: | (SEQ ID | DLW | A | (SEQ | F |
| | APGKGLEWSSISG | QQKPGQAPRLLI | 1138) | NO: | (SEQ | (SEQ | ID | (SEQ |
| | GGGSTYYADSVKG | YGASRRATGIPA | | 1139) | ID NO: | ID | NO: | ID |
| | RFTISRDNSKNTL | RFSGSGSGTEFT | | | 1140) | NO: | 1142) | NO: |
| | YLQMNSLRAEDTA | LTISSLQSEDFA | | | | 1141) | | 1143) |
| | VYYCARERVTWNS | VYYCQQYYRWPL | | | | | | |
| | YFDLWGQGTLVTV | TFGQGTKVEIK | | | | | | |
| | SS (SEQ ID | (SEQ ID NO: | | | | | | |
| | NO: 781) | 782) | | | | | | |
| MIAB73 | EVQLLESGGGLVQ | EIVMTQSPATLS | FAFNNYA | GISGSGG | NARERV | RASQS | TASIR | CQQYK |
| | PGGSLRLSCAASG | VSPGERATLSCR | MS (SEQ | TTYYA | DWNSYF | VRSSL | AT | NYPLT |
| | FAFNNYAMSWVRQ | ASQSVRSSLSWY | ID NO: | (SEQ ID | DLW | S | (SEQ | F |
| | APGKGLEWSGISG | QQKPGQAPRLLI | 1144) | NO: | (SEQ | (SEQ | ID | (SEQ |
| | SGGTTYYADSVKG | YTASIRATGIPA | | 1145) | ID NO: | ID | NO: | ID |
| | RFTISRDNSKNTL | RFSGSGSGTEFT | | | 1146) | NO: | 1137) | NO: |
| | YLQMNSLRAEDTA | LTISSLQSEDFA | | | | 1147) | | 1148) |
| | VYYNARERVDWNS | VYYCQQYKNYPL | | | | | | |
| | YFDLWGQGTLVTV | TFGQGTKVEIK | | | | | | |
| | SS (SEQ ID | (SEQ ID NO: | | | | | | |
| | NO: 783) | 784) | | | | | | |
| MIAB74 | EVQLLESGGGLVQ | EIVMTQSPATLS | FTFNNYA | AVSGSGA | CHRERV | RASQS | GSFTR | CQQYS |
| | PGGSLRLSCAASG | VSPGERATLSCR | MN (SEQ | STYYA | DWNSYF | VSSNL | AT | NWPPL |
| | FTFNNYAMNWVRQ | ASQSVSSNLAWY | ID NO: | (SEQ ID | DLW | A | (SEQ | F |
| | APGKGLEWSAVSG | QQKPGQAPRLLI | 1019) | NO: | (SEQ | (SEQ | ID | (SEQ |
| | SGASTYYADSVKG | YGSFTRATGIPA | | 1149) | ID NO: | ID | NO: | ID |
| | RFTISRDNSKNTL | RFSGSGSGTEFT | | | 1150) | NO: | 1151) | NO: |
| | YLQMNSLRAEDTA | LTISSLQSEDFA | | | | 1039) | | 1152) |
| | VYYCHRERVDWNS | VYYCQQYSNWPP | | | | | | |
| | YFDLWGQGTLVTV | LFGQGTKVEIK | | | | | | |
| | SS (SEQ ID | (SEQ ID NO: | | | | | | |
| | NO: 785) | 786) | | | | | | |
| MIAB75 | EVQLLESGGGLVQ | EIVMTQSPATLS | FTFGDYA | TVSSASA | CKRERV | RASQS | DATTR | CQQYY |
| | PGGSLRLSCAASG | VSPGERATLSCR | MS (SEQ | LIYYA | DWNSYF | VSNTL | AT | DWPIT |
| | FTFGDYAMSWVRQ | ASQSVSNTLAWY | ID NO: | (SEQ ID | DLW | A | (SEQ | F |
| | APGKGLEWATVSS | QQKPGQAPRLLI | 1153) | NO: | (SEQ | (SEQ | ID | (SEQ |
| | ASALIYYADSVKG | YDATTRATGIPA | | 1154) | ID NO: | ID | NO: | ID |
| | RFTISRDNSKNTL | RFSGSGSGTEFT | | | 1155) | NO: | 896) | NO: |
| | YLQMNSLRAEDTA | LTISSLQSEDFA | | | | 930) | | 987) |
| | VYYCKRERVDWNS | VYYCQQYYDWPI | | | | | | |
| | YFDLWGQGTLVTV | TFGQGTKVEIK | | | | | | |
| | SS (SEQ ID | (SEQ ID NO: | | | | | | |
| | NO: 787) | 788) | | | | | | |
| MIAB76 | EVQLLESGGGLVQ | EIVMTQSPATLS | FTFSNYV | GISGSGT | CARERV | RASQS | AASTR | CQQYE |
| | PGGSLRLSCAASG | VSPGERATLSCR | MT (SEQ | NTYYA | DWNSQF | VNDNL | VT | RWPPT |
| | FTFSNYVMTWVRQ | ASQSVNDNLAWY | ID NO: | (SEQ ID | DLW | A | (SEQ | F |
| | APGKGLEWSGISG | QQKPGQAPRLLI | 1156) | NO: | (SEQ | (SEQ | ID | (SEQ |
| | SGTNTYYADSVKG | YAASTRVTGIPA | | 1157) | ID NO: | ID | NO: | ID |
| | RFTISRDNSKNTL | RFSGSGSGTEFT | | | 1158) | NO: | 1160) | NO: |
| | YLQMNSLRAEDTA | LTISSLQSEDFA | | | | 1159) | | 889) |
| | VYYCARERVDWNS | VYYCQQYERWPP | | | | | | |
| | QFDLWGQGTLVTV | TFGQGTKVEIK | | | | | | |
| | SS (SEQ ID | (SEQ ID NO: | | | | | | |
| | NO: 789) | 790) | | | | | | |
| MIAB77 | EVQLLESGGGLVQ | EIVMTQSPATLS | LTFSSYA | SITGSGS | CARERV | RASQS | GGSTR | CQQYH |
| | PGGSLRLSCAASG | VSPGERATLSCR | MS (SEQ | GTFYA | DWNSYF | VSSNV | AT | LWPPT |
| | LTFSSYAMSWVRQ | ASQSVSSNVAWY | ID NO: | (SEQ ID | DDW | A | (SEQ | F |
| | APGKGLEWASITG | QQKPGQAPRLLI | 1161) | NO: | (SEQ | (SEQ | ID | (SEQ |
| | SGSGTFYADSVKG | YGGSTRATGIPA | | 1162) | ID NO: | ID | NO: | ID |
| | RFTISRDNSKNTL | RFSGSGSGTEFT | | | 1163) | NO: | 1165) | NO: |
| | YLQMNSLRAEDTA | LTISSLQSEDFA | | | | 1164) | | 1166) |
| | VYYCARERVDWNS | VYYCQQYHLWPP | | | | | | |
| | YFDDWGQGTLVTV | TFGQGTKVEIK | | | | | | |
| | SS (SEQ ID | (SEQ ID NO: | | | | | | |
| | NO: 791) | 792) | | | | | | |
| MIAB78 | EVQLLESGGGLVQ | EIVMTQSPATLS | FTFSTYA | AVSGSGA | CRRERV | RASRS | GTSSR | CQQYE |
| | PGGSLRLSCAASG | VSPGERATLSCR | TS (SEQ | STYYA | DWNSYF | VSTNL | AT | RWPPT |
| | FTFSTYATSWVRQ | ASRSVSTNLAWY | ID NO: | (SEQ ID | DLW | A | (SEQ | F |
| | APGKGLEWSAVSG | QQKPGQAPRLLI | 1167) | NO: | (SEQ | (SEQ | ID | (SEQ |
| | SGASTYYADSVKG | YGTSSRATGIPA | | 1149) | ID NO: | ID | NO: | ID |
| | RFTISRDNSKNTL | RFSGSGSGTEFT | | | 1168) | NO: | 1087) | NO: |
| | YLQMNS LRAEDTA | LTISSLQSEDFA | | | | 1169) | | 889) |
| | VYYCRRERVDWNS | VYYCQQYERWPP | | | | | | |
| | YFDLWGQGTLVTV | TFGQGTKVEIK | | | | | | |
| | SS (SEQ ID | (SEQ ID NO: | | | | | | |
| | NO: 793) | 794) | | | | | | |
| MIAB79 | EVQLLESGGGLVQ | EIVMTQSPATLS | FTFSSYG | GISGSGG | CAEERV | RASHS | EASTR | CQQYY |
| | PGGSLRLSCAASG | VSPGERATLSCR | MN (SEQ | NTFYA | DWNSYF | VSSKL | AT | HWPRT |
| | FTFSSYGMNWVRQ | ASHSVSSKLAWY | ID NO: | (SEQ ID | DLW | A | (SEQ | F |
| | APGKGLEWSGISG | QQKPGQAPRLLI | 1170) | NO: | (SEQ | (SEQ | ID | (SEQ |
| | SGGNTFYADSVKG | YEASTRATGIPA | | 1171) | ID NO: | ID | NO: | ID |
| | RFTISRDNSKNTL | RFSGSGSGTEFT | | | 1172) | NO: | 1112) | NO: |
| | YLQMNSLRAEDTA | LTISSLQSEDFA | | | | 1173) | | 1174) |
| | VYYCAEERVDWNS | VYYCQQYYHWPR | | | | | | |
| | YFDLWGQGTLVTV | TFGQGTKVEIK | | | | | | |
| | SS (SEQ ID | (SEQ ID NO: | | | | | | |
| | NO: 795) | 796) | | | | | | |
| MIAB80 | EVQLLESGGGLVQ | EIVMTQSPATLS | FTFSNYV | AISGSGR | CARERV | RASQS | DASTR | CQQYN |
| | PGGSLRLSCAASG | VSPGERATLSCR | MS (SEQ | STYYA | DNNSYF | VRDNL | VT | HWPPT |
| | FTFSNYVMSWVRQ | ASQSVRDNLAWY | ID NO: | (SEQ ID | DLW | A | (SEQ | F |
| | APGKGLEWSAISG | QQKPGQAPRLLI | 1175) | NO: | (SEQ | (SEQ | ID | (SEQ |
| | SGRSTYYADSVKG | YDASTRVTGIPA | | 1176) | ID NO: | ID | NO: | ID |
| | RFTISRDNSKNTL | RFSGSGSGTEFT | | | 1177) | NO: | | NO: |
| | YLQMNSLRAEDTA | LTISSLQSEDFA | | | | 1178) | 887) | 1003) |
| | VYYCARERVDNNS | VYYCQQYNHWPP | | | | | | |
| | YFDLWGQGTLVTV | TFGQGTKVEIK | | | | | | |
| | SS (SEQ ID | (SEQ ID NO: | | | | | | |
| | NO: 797) | 798) | | | | | | |
| MIAB81 | EVQLLESGGGLVQ | EIVMTQSPATLS | FTFTTYA | AISGSGG | WARERV | RASQS | RASTR | CQQYS |
| | PGGSLRLSCAASG | VSPGERATLSCR | LS (SEQ | STYSA | DWNSYF | VSSYL | AA | DWPPT |
| | FTFTTYALSWVRQ | ASQSVSSYLAWY | ID NO: | (SEQ ID | DLW | A | (SEQ | F |
| | APGKGLEWSAISG | QQKPGQAPRLLI | 1031) | NO: | SEQ | (SEQ | ID | (SEQ |
| | SGGSTYSADSVKG | YRASTRAAGIPA | | 1179) | ID NO: | ID | NO: | ID |
| | RFTISRDNSKNTL | RFSGSGSGTEFT | | | 1180) | NO: | 1181) | NO: |
| | YLQMNSLRAEDTA | LTISSLQSEDFA | | | | 1061) | | 1030) |
| | VYYWARERVDWNS | VYYCQQYSDWPP | | | | | | |
| | YFDLWGQGTLVTV | TFGQGTKVEIK | | | | | | |
| | SS (SEQ ID | (SEQ ID NO: | | | | | | |
| | NO: 799) | 800) | | | | | | |
| MIAB82 | EVQLLESGGGLVQ | EIVMTQSPATLS | FAFSSSA | ALSGSGG | CARERV | RASQS | AASTR | CHQYY |
| | PGGSLRLSCAASG | VSPGERATLSCR | MS (SEQ | STYSA | DWNSYF | ISTKL | AT | TWPYT |
| | FAFSSSAMSWVRQ | ASQSISTKLAWY | ID NO: | (SEQ ID | DLW | A | (SEQ | F |
| | APGKGLEWSALSG | QQKPGQAPRLLI | 1182) | NO: | (SEQ | (SEQ | ID | (SEQ |
| | SGGSTYSADSVKG | YAASTRATGIPA | | 1183) | ID NO: | ID | NO: | ID |
| | RFTISRDNSKNTL | RFSGSGSGTEFT | | | 382) | NO: | 1014) | NO: |
| | YLQMNSLRAEDTA | LTISSLQSEDFA | | | | 1184) | | 1185) |
| | VYYCARERVDWNS | VYYCHQYYTWPY | | | | | | |
| | YFDLWGQGTLVTV | TFGQGTKVEIK | | | | | | |
| | SS (SEQ ID | (SEQ ID NO: | | | | | | |
| | NO: 801) | 802) | | | | | | |
| MIAB83 | EVQLLESGGGLVQ | EIVMTQSPATLS | FIFTDYA | AITGSGG | CAREGV | RASES | DASTR | CQQYK |
| | PGGSLRLSCAASG | VSPGERATLSCR | MS SEQ | TTYYA | DWNSYF | VRSNL | TT | TLPHT |
| | FIFTDYAMSWVRQ | ASESVRSNLAWY | ID NO: | (SEQ ID | DLW | A | SEQ | F |
| | APGKGLEWSAITG | QQKPGQAPRLLI | 1186) | NO: | (SEQ | (SEQ | ID | (SEQ |
| | SGGTTYYADSVKG | YDASTRTTGIPA | | 1187) | ID NO: | ID | NO: | ID |
| | RFTISRDNSKNTL | RFSGSGSGTEFT | | | 1188) | NO: | 1190) | NO: |
| | YLQMNSLRAEDTA | LTISSLQSEDFA | | | | 1189) | | 1052) |
| | VYYCAREGVDWNS | VYYCQQYKTLPH | | | | | | |
| | YFDLWGQGTLVTV | TFGQGTKVEIK | | | | | | |
| | SS (SEQ ID | (SEQ ID NO: | | | | | | |
| | NO: 803) | 804) | | | | | | |
| MIAB84 | EVQLLESGGGLVQ | EIVMTQSPATLS | FTFSSYA | TISGSGR | CTRERV | RASQS | GASTS | CQHYY |
| | PGGSLRLSCAASG | VSPGERATLSCR | MT (SEQ | STYYA | DWNSYF | VSSRL | AT | NWPPT |
| | FTFSSYAMTWVRQ | ASQSVSSRLAWY | ID NO: | (SEQ ID | DLW | A | (SEQ | F |
| | APGKGLEWSTISG | QQKPGQAPRLLI | 1191) | NO: | (SEQ | SEQ | ID | (SEQ |
| | SGRSTYYADSVKG | YGASTSATGIPA | | 1192) | ID NO: | ID | NO: | ID |
| | RFTISRDNSKNTL | RFSGSGSGTEFT | | | 1193) | NO: | 1195) | NO: |
| | YLQMNSLRAEDTA | LTISSLQSEDFA | | | | 1194) | | 1196) |
| | VYYCTRERVDWNS | VYYCQHYYNWPP | | | | | | |
| | YFDLWGQGTLVTV | TFGQGTKVEIK | | | | | | |
| | SS (SEQ ID | (SEQ ID NO: | | | | | | |
| | NO: 805) | 806) | | | | | | |
| MIAB85 | EVQLLESGGGLVQ | EIVMTQSPATLS | FTFDDYA | ASITSSS | CARERR | RASQS | DASTT | CQQYH |
| | PGGSLRLSCAASG | VSPGERATLSCR | MH (SEQ | AFIDYA | DWNSYF | ISSNL | AT | LWPPT |
| | FTFDDYAMHWVRQ | ASQSISSNLAWY | ID NO: | (SEQ ID | DLW | A | (SEQ | F |
| | APGKGLEWVASIT | QQKPGQAPRLLI | 135) | NO: | (SEQ | (SEQ | ID | (SEQ |
| | SSSAFIDYADSVK | YDASTTATGIPA | | 381) | ID NO: | ID | NO: | ID |
| | GRFTISRDNSKNT | RFSGSGSGTEFT | | | 1197) | NO: | 1008) | NO: |
| | LYLQMNSLRAEDT | LTISSLQSEDFA | | | | 1198) | | 1166) |
| | AVYYCARERRDWN | VYYCQQYHLWPP | | | | | | |
| | SYFDLWGQGTLVT | TFGQGTKVEIK | | | | | | |
| | VSS (SEQ ID | (SEQ ID NO: | | | | | | |
| | NO: 807) | 808) | | | | | | |
| MIAB86 | EVQLLESGGGLVQ | EIVMTQSPATLS | FTFNNYA | TITSSGA | CARERV | RASQS | AASTR | CQQYK |
| | PGGSLRLSCAASG | VSPGERATLSCR | MS (SEQ | STFYA | DKNSYF | VNDNL | VT | TWPLT |
| | FTFNNYAMSWVRQ | ASQSVNDNLAWY | ID NO: | (SEQ ID | DLW | A | (SEQ | F |
| | APGKGLEWSTITS | QQKPGQAPRLLI | 1199) | NO: | (SEQ | (SEQ | ID | (SEQ |
| | SGASTFYADSVKG | YAASTRVTGIPA | | 1200) | ID NO: | ID | NO: | ID |
| | RFTISRDNSKNTL | RFSGSGSGTEFT | | | 1201) | NO: | 1160) | NO: |
| | YLQMNSLRAEDTA | LTISSLQSEDFA | | | | 1159) | | 1202) |
| | VYYCARERVDKNS | VYYCQQYKTWPL | | | | | | |
| | YFDLWGQGTLVTV | TFGQGTKVEIK | | | | | | |
| | SS (SEQ ID | (SEQ ID NO: | | | | | | |
| | NO: 809) | 810) | | | | | | |
| MIAB87 | EVQLLESGGGLVQ | EIVMTQSPATLS | LTFSSSA | AIRGSGG | CTRERV | RTSQS | GISTR | CQQYK |
| | PGGSLRLSCAASG | VSPGERATLSCR | MS (SEQ | STYYA | DWNSYF | VSSNL | AT | TWPWT |
| | LTFSSSAMSWVRQ | TSQSVSSNLAWY | ID NO: | (SEQ ID | DLW | A | (SEQ | F |
| | APGKGLEWSAIRG | QQKPGQAPRLLI | 1203) | NO: | (SEQ | (SEQ | ID | (SEQ |
| | SGGSTYYADSVKG | YGISTRATGIPA | | 1204) | ID NO: | ID | NO: | ID |
| | RFTISRDNSKNTL | RFSGSGSGTEFT | | | 1193) | NO: | 1206) | NO: |
| | YLQMNSLRAEDTA | LTISSLQSEDFA | | | | 1205) | | 1207) |
| | VYYCTRERVDWNS | VYYCQQYKTWPW | | | | | | |
| | YFDLWGQGTLVTV | TFGQGTKVEIK | | | | | | |
| | SS (SEQ ID | (SEQ ID NO: | | | | | | |
| | NO: 811) | 812) | | | | | | |
| MIAB88 | EVQLLESGGGLVQ | EIVMTQSPATLS | FIFSNYG | TISSSGA | NARERV | RASQS | GASTR | CQQYY |
| | PGGSLRLSCAASG | VSPGERATLSCR | MS (SEQ | FTYYA | DWNSYF | VRGNL | AN | RWPPT |
| | FIFSNYGMSWVRQ | ASQSVRGNLAWY | ID NO: | (SEQ ID | DLW | A | (SEQ | F |
| | APGKGLEWSTISS | QQKPGQAPRLLI | 1138) | NO: | (SEQ | (SEQ | ID | (SEQ |
| | SGAFTYYADSVKG | YGASTRANGIPA | | 1208) | ID NO: | ID | NO: | ID |
| | RFTISRDNSKNTL | RFSGSGSGTEFT | | | 1146) | NO: | 1209) | NO: |
| | YLQMNSLRAEDTA | LTISSLQSEDFA | | | | 1141) | | 1210) |
| | VYYNARERVDWNS | VYYCQQYYRWPP | | | | | | |
| | YFDLWGQGTLVTV | TFGQGTKVEIK | | | | | | |
| | SS (SEQ ID | (SEQ ID | | | | | | |
| | NO: 813) | NO: 814) | | | | | | |
| MIAB89 | EVQLLESGGGLVQ | EIVMTQSPATLS | FTFSSYA | SISGSSG | CARERV | RASQS | AASNR | CQQYS |
| | PGGSLRLSCAASG | VSPGERATLSCR | MS (SEQ | SIFYA | DWNSYF | ISSYL | AT | TWPQT |
| | FTFSSYAMSWVRQ | ASQSISSYLAWY | ID NO: | (SEQ ID | DEW | A | (SEQ | F |
| | APGKGLEWSSISG | QQKPGQAPRLLI | 1211) | NO: | (SEQ | (SEQ | ID | (SEQ |
| | SSGSIFYADSVKG | YAASNRATGIPA | | 1212) | ID NO: | ID | NO: | ID |
| | RFTISRDNSKNTL | RFSGSGSGTEFT | | | 1213) | NO: | 1068) | NO: |
| | YLQMNSLRAEDTA | LTISSLQSEDFA | | | | 1214) | | 1121) |
| | VYYCARERVDWNS | VYYCQQYSTWPQ | | | | | | |
| | YFDEWGQGTLVTV | TFGQGTKVEIK | | | | | | |
| | SS (SEQ ID | (SEQ ID NO: | | | | | | |
| | NO: 815) | 816) | | | | | | |
| MIAB90 | EVQLLESGGGLVQ | EIVMTQSPATLS | FSFSTYA | GISGSGG | CARERV | RASQS | GASTR | CQQYY |
| | PGGSLRLSCAASG | VSPGERATLSCR | MS (SEQ | NTHYA | DWNSNF | VSSNV | AT | DYPRT |
| | FSFSTYAMSWVRQ | ASQSVSSNVAWY | ID NO: | (SEQ ID | DLW | A | (SEQ | F |
| | APGKGLEWSGISG | QQKPGQAPRLLI | 1215) | NO: | (SEQ | (SEQ | ID | (SEQ |
| | SGGNTHYADSVKG | YGASTRATGIPA | | 1114) | ID NO: | ID | NO: | ID |
| | RFTISRDNSKNTL | RFSGSGSGTEFT | | | 1216) | NO: | 241) | NO: |
| | YLQMNSLRAEDTA | LTISSLQSEDFA | | | | 1164) | | 1217) |
| | VYYCARERVDWNS | VYYCQQYYDYPR | | | | | | |
| | NFDLWGQGTLVTV | TFGQGTKVEIK | | | | | | |
| | SS (SEQ ID | (SEQ ID NO: | | | | | | |
| | NO: 817) | 818) | | | | | | |
| MIAB91 | EVQLLESGGGLVQ | EIVMTQSPATLS | FTSSSYA | SISYSGG | CARERV | RASQS | GASSR | CQQYY |
| | PGGSLRLSCAASG | VSPGERATLSCR | MG (SEQ | STDYA | DWNSYF | VSDKL | AA | DWPPT |
| | FTSSSYAMGWVRQ | ASQSVSDKLAWY | ID NO: | (SEQ ID | GLW | A | (SEQ | F |
| | APGKGLEWASISY | QQKPGQAPRLLI | 1218) | NO: | (SEQ | (SEQ | ID | (SEQ |
| | SGGSTDYADSVKG | YGASSRAAGIPA | | 1219) | ID NO: | ID | NO: | ID |
| | RFTISRDNSKNTL | RFSGSGSGTEFT | | | 1220) | NO: | 1221) | NO: |
| | YLQMNSLRAEDTA | LTISSLQSEDFA | | | | 1111) | | 1222) |
| | VYYCARERVDWNS | VYYCQQYYDWPP | | | | | | |
| | YFGLWGQGTLVTV | TFGQGTKVEIK | | | | | | |
| | SS (SEQ ID | (SEQ ID NO: | | | | | | |
| | NO: 819) | 820) | | | | | | |
| MIAB92 | EVQLLESGGGLVQ | EIVMTQSPATLS | FIFRNYA | AITGSGG | CARERV | RASHS | GAATR | CQQYN |
| | PGGSLRLSCAASG | VSPGERATLSCR | MS (SEQ | TTDYA | DWYSYF | VSSNL | AT | NRPPT |
| | FIFRNYAMSWVRQ | ASHSVSSNLAWY | ID NO: | (SEQ ID | DLW | A | (SEQ | F |
| | APGKGLEWSAITG | QQKPGQAPRLLI | 1223) | NO: | (SEQ | (SEQ | ID | (SEQ |
| | SGGTTDYADSVKG | YGAATRATGIPA | | 1224) | ID NO: | ID | NO: | ID |
| | RFTISRDNSKNTL | RFSGSGSGTEFT | | | 1225) | NO: | 1227) | NO: |
| | YLQMNSLRAEDTA | LTISSLQSEDFA | | | | 1226) | | 937) |
| | VYYCARERVDWYS | VYYCQQYNNRPP | | | | | | |
| | YFDLWGQGTLVTV | TFGQGTKVEIK | | | | | | |
| | SS (SEQ ID | (SEQ ID NO: | | | | | | |
| | NO: 821) | 822) | | | | | | |
| MIAB93 | EVQLLESGGGLVQ | EIVMTQSPATLS | FTFNFYA | AISSSSG | CAREDV | TASQS | DATTR | CQQYT |
| | PGGSLRLSCAASG | VSPGERATLSCT | MS (SEQ | RTYYA | DWNSYF | VSSNL | AT | TWPPT |
| | FTFNFYAMSWVRQ | ASQSVSSNLAWY | ID NO: | (SEQ ID | DLW | A | (SEQ | F |
| | APGKGLEWAAISS | QQKPGQAPRLLI | 1228) | NO: | (SEQ | (SEQ | | (SEQ |
| | SSGRTYYADSVKG | YDATTRATGIPA | | 1130) | ID NO: | ID | ID | ID |
| | RFTISRDNSKNTL | RFSGSGSGTEFT | | | 1229) | NO: | NO: | NO: |
| | YLQMNSLRAEDTA | LTISSLQSEDFA | | | | 1136) | 896) | 959) |
| | VYYCAREDVDWNS | VYYCQQYTTWPP | | | | | | |
| | YFDLWGQGTLVTV | TFGQGTKVEIK | | | | | | |
| | SS (SEQ ID | (SEQ ID NO: | | | | | | |
| | NO: 823) | 824) | | | | | | |
| MIAB94 | EVQLLESGGGLVQ | EIVMTQSPATLS | FTFGNYA | TITSSGG | CARERV | RASQS | GASTR | CQQYD |
| | PGGSLRLSCAASG | VSPGERATLSCR | MT (SEQ | STDYA | DENSYF | ISTSL | AG | DWPPT |
| | FTFGNYAMTWVRQ | ASQSISTSLAWY | ID NO: | (SEQ ID | DLW | A | (SEQ | F |
| | APGKGLEWSTITS | QQKPGQAPRLLI | 1230) | NO: | (SEQ | (SEQ | ID | (SEQ |
| | SGGSTDYADSVKG | YGASTRAGGIPA | | 916) | ID NO: | ID | NO: | ID |
| | RFTISRDNSKNTL | RFSGSGSGTEFT | | | 1231) | NO: | 1233) | NO: |
| | YLQMNSLRAEDTA | LTISSLQSEDFA | | | | 1232) | | 1234) |
| | VYYCARERVDENS | VYYCQQYDDWPP | | | | | | |
| | YFDLWGQGTLVTV | TFGQGTKVEIK | | | | | | |
| | SS (SEQ ID | (SEQ ID NO: | | | | | | |
| | NO: 825) | 826) | | | | | | |
| MIAB95 | EVQLLESGGGLVQ | EIVMTQSPATLS | FTLSNYA | AISGSGG | CARERV | RASQS | DASSR | CQQYK |
| | PGGSLRLSCAASG | VSPGERATLSCR | MS (SEQ | RTYYA | DWNSYN | VSSNV | AT | TLPHT |
| | FTLSNYAMSWVRQ | ASQSVSSNVAWY | ID NO: | (SEQ ID | DLW | A | (SEQ | F |
| | APGKGLEWSAISG | QQKPGQAPRLLI | 1235) | NO: | (SEQ | (SEQ | ID | (SEQ |
| | SGGRTYYADSVKG | YDASSRATGIPA | | 1236) | ID NO: | ID | NO: | ID |
| | RFTISRDNSKNTL | RFSGSGSGTEFT | | | 1060) | NO: | 992) | NO: |
| | YLQMNSLRAEDTA | LTISSLQSEDFA | | | | 1164) | | 1052) |
| | VYYCARERVDWNS | VYYCQQYKTLPH | | | | | | |
| | YNDLWGQGTLVTV | TFGQGTKVEIK | | | | | | |
| | SS (SEQ ID | (SEQ ID NO: | | | | | | |
| | NO: 827) | 828) | | | | | | |
| MIAB96 | EVQLLESGGGLVQ | EIVMTQSPATLS | FTFSTYA | AISSSGG | CARERV | RASQS | DASTR | CQQYH |
| | PGGSLRLSCAASG | VSPGERATLSCR | MI (SEQ | SIDYA | DANSYF | ISGNL | AA | NWPPT |
| | FTFSTYAMIWVRQ | ASQSISGNLAWY | ID NO: | (SEQ ID | DLW | A | (SEQ | F |
| | APGKGLEWSAISS | QQKPGQAPRLLI | 1237) | NO: | (SEQ | (SEQ | ID | (SEQ |
| | SGGSIDYADSVKG | YDASTRAAGIPA | | 1042) | ID NO: | ID | NO: | ID |
| | RFTISRDNSKNTL | RFSGSGSGTEFT | | | 1238) | NO: | 1240) | NO: |
| | YLQMNSLRAEDTA | LTISSLQSEDFA | | | | 1239) | | 1025) |
| | VYYCARERVDANS | VYYCQQYHNWPP | | | | | | |
| | YFDLWGQGTLVTV | TFGQGTKVEIK | | | | | | |
| | SS (SEQ ID | (SEQ ID NO: | | | | | | |
| | NO: 829) | 830) | | | | | | |
| MIAB97 | EVQLLESGGGLVQ | EIVMTQSPATLS | FSFSNYA | TITSSGG | CARERV | RASQS | SASAR | CQQYK |
| | PGGSLRLSCAASG | VSPGERATLSCR | MT (SEQ | STDYA | DWNSYF | VSRNL | AT | TLPHT |
| | FSFSNYAMTWVRQ | ASQSVSRNLAWY | ID NO: | (SEQ ID | DLW | A | (SEQ | F |
| | APGKGLEWSTITS | QQKPGQAPRLLI | 1241) | NO: | (SEQ | (SEQ | ID | (SEQ |
| | SGGSTDYADSVKG | YSASARATGIPA | | 916) | ID NO: | ID | NO: | ID |
| | RFTISRDNSKNTL | RFSGSGSGTEFT | | | 382) | NO: | 1242) | NO: |
| | YLQMNSLRAEDTA | LTISSLQSEDFA | | | | 1050) | | 1052) |
| | VYYCARERVDWNS | VYYCQQYKTLPH | | | | | | |
| | YFDLWGQGTLVTV | TFGQGTKVEIK | | | | | | |
| | SS (SEQ ID | (SEQ ID NO: | | | | | | |
| | NO: 831) | 832) | | | | | | |
| MIAB98 | EVQLLESGGGLVQ | EIVMTQSPATLS | FTLRNYA | GISGSGG | CARSRV | RASQS | DASNR | CQQYD |
| | PGGSLRLSCAASG | VSPGERATLSCR | MS (SEQ | SPYYA | DWNSYF | VGNNL | AT | DWPPT |
| | FTLRNYAMSWVRQ | ASQSVGNNLAWY | ID NO: | (SEQ ID | QLW | A | (SEQ | F |
| | APGKGLEWSGISG | QQKPGQAPRLLI | 976) | NO: | (SEQ | (SEQ | ID | (SEQ |
| | SGGSPYYADSVKG | YDASNRATGIPA | | 984) | ID NO: | ID | NO: | ID |
| | RFTISRDNSKNTL | RFSGSGSGTEFT | | | 1243) | NO: | 1245) | NO: |
| | YLQMNSLRAEDTA | LTISSLQSEDFA | | | | 1244) | | 1234) |
| | VYYCARSRVDWNS | VYYCQQYDDWPP | | | | | | |
| | YFQLWGQGTLVTV | TFGQGTKVEIK | | | | | | |
| | SS (SEQ ID | (SEQ ID NO: | | | | | | |
| | NO: 833) | 834) | | | | | | |
| MIAB99 | EVQLLESGGGLVQ | EIVMTQSPATLS | FTFSSFG | AISGGGG | CARERV | RASQS | DTSSR | CQQYK |
| | PGGSLRLSCAASG | VSPGERATLSCR | MS (SEQ | TTYYA | DWKSYF | VGSNL | AT | TWPFT |
| | FTFSSFGMSWVRQ | ASQSVGSNLAWY | ID NO: | (SEQ ID | DLW | A | (SEQ | F |
| | APGKGLEWSAISG | QQKPGQAPRLLI | 1246) | NO: | (SEQ | (SEQ | ID | (SEQ |
| | GGGTTYYADSVKG | YDTSSRATGIPA | | 1247) | ID NO: | ID | NO: | ID |
| | RFTISRDNSKNTL | RFSGSGSGTEFT | | | 1248) | NO: | 962) | NO: |
| | YLQMNSLRAEDTA | LTISSLQSEDFA | | | | 1249) | | 1250) |
| | VYYCARERVDWKS | VYYCQQYKTWPF | | | | | | |
| | YFDLWGQGTLVTV | TFGQGTKVEIK | | | | | | |
| | SS (SEQ ID | (SEQ ID NO: | | | | | | |
| | NO: 835) | 836) | | | | | | |
| MIAB100 | EVQLLESGGGLVQ | EIVMTQSPATLS | FTFTTYA | TISGSGG | CARVRV | RASQS | SASSR | CQQYY |
| | PGGSLRLSCAASG | VSPGERATLSCR | MT (SEQ | STYYV | DWNSYF | IGTNL | AT | HWPQT |
| | FTFTTYAMTWVRQ | ASQSIGTNLAWY | ID NO: | (SEQ ID | DLW | A | (SEQ | F |
| | APGKGLEWSTISG | QQKPGQAPRLLI | 1251) | NO: | (SEQ | (SEQ | ID | (SEQ |
| | SGGSTYYVDSVKG | YSASSRATGIPA | | 1252) | ID NO: | ID | NO: | ID |
| | RFTISRDNSKNTL | RFSGSGSGTEFT | | | 1253) | NO: | 1255) | NO: |
| | YLQMNSLRAEDTA | LTISSLQSEDFA | | | | 1254) | | 897) |
| | VYYCARVRVDWNS | VYYCQQYYHWPQ | | | | | | |
| | YFDLWGQGTLVTV | TFGQGTKVEIK | | | | | | |
| | SS (SEQ ID | (SEQ ID NO: | | | | | | |
| | NO: 837) | 838) | | | | | | |
| MIAB101 | EVQLLESGGGLVQ | EIVMTQSPATLS | FTFGSFA | VISGSGG | CARERV | RASQS | GASNR | CQQYD |
| | PGGSLRLSCAASG | VSPGERATLSCR | MS (SEQ | STHYA | DWNSYF | VSTYL | AT | TWPYT |
| | FTFGSFAMSWVRQ | ASQSVSTYLAWY | ID NO: | (SEQ ID | DLW | A | (SEQ | F |
| | APGKGLEWSVISG | QQKPGQAPRLLI | 1256) | NO: | (SEQ | (SEQ | ID | (SEQ |
| | SGGSTHYADSVKG | YGASNRATGIPA | | 1257) | ID NO: | ID | NO: | ID |
| | RFTISRDNSKNTL | RFSGSGSGTEFT | | | 382) | NO: | 1258) | NO: |
| | YLQMNSLRAEDTA | LTISSLQSEDFA | | | | 1126) | | 1259) |
| | VYYCARERVDWNS | VYYCQQYDTWPY | | | | | | |
| | YFDLWGQGTLVTV | TFGQGTKVEIK | | | | | | |
| | SS (SEQ ID | (SEQ ID NO: | | | | | | |
| | NO: 839) | 840) | | | | | | |
| MIAB102 | EVQLLESGGGLVQ | EIVMTQSPATLS | FTFTDYA | TISGSGA | CAREDV | RTSQS | GPSTR | CQQYK |
| | PGGSLRLSCAASG | VSPGERATLSCR | MN (SEQ | TTYYA | DWNSYF | VSSDL | AT | TWPQT |
| | FTFTDYAMNWVRQ | TSQSVSSDLAWY | ID NO: | (SEQ ID | DLW | A | (SEQ | F |
| | APGKGLEWSTISG | QQKPGQAPRLLI | 1260) | NO: | (SEQ | (SEQ | ID | (SEQ |
| | SGATTYYADSVKG | YGPSTRATGIPA | | 1261) | ID NO: | ID | NO: | ID |
| | RFTISRDNSKNTL | RFSGSGSGTEFT | | | 1229) | NO: | 1263) | NO: |
| | YLQMNSLRAEDTA | LTISSLQSEDFA | | | | 1262) | | 1264) |
| | VYYCAREDVDWNS | VYYCQQYKTWPQ | | | | | | |
| | YFDLWGQGTLVTV | TFGQGTKVEIK | | | | | | |
| | SS (SEQ ID | (SEQ ID NO: | | | | | | |
| | NO: 841) | 626) | | | | | | |
| MIAB103 | EVQLLESGGGLVQ | EIVMTQSPATLS | FTFSSYA | SISGSGG | CARERM | RASQS | AASTR | CQQYN |
| | PGGSLRLSCAASG | VSPGERATLSCR | MN (SEQ | GTYYA | DWNSYF | VSTDL | VT | TAPLT |
| | FTFSSYAMNWVRQ | ASQSVSTDLAWY | ID NO: | (SEQ ID | DLW | A | (SEQ | F |
| | APGKGLEWSSISG | QQKPGQAPRLLI | 1265) | NO: | (SEQ | (SEQ | ID | (SEQ |
| | SGGGTYYADSVKG | YAASTRVTGIPA | | 1266) | ID NO: | ID | NO: | ID |
| | RFTISRDNSKNTL | RFSGSGSGTEFT | | | 1267) | NO: | 1160) | NO: |
| | YLQMNSLRAEDTA | LTISSLQSEDFA | | | | 1268) | | 1269) |
| | VYYCARERMDWNS | VYYCQQYNTAPL | | | | | | |
| | YFDLWGQGTLVTV | TFGQGTKVEIK | | | | | | |
| | SS (SEQ ID | (SEQ ID NO: | | | | | | |
| | NO: 842) | 843) | | | | | | |
| MIAB104 | EVQLLESGGGLVQ | EIVMTQSPATLS | FSFGSYA | TISGSGA | CARERV | RASQS | GAATR | CQQYY |
| | PGGSLRLSCAASG | VSPGERATLSCR | MS (SEQ | GTYYA | DWNSYI | ISGNL | AT | KWPIT |
| | FSFGSYAMSWVRQ | ASQSISGNLAWY | ID NO: | (SEQ ID | DLW | A | (SEQ | F |
| | APGKGLEWSTISG | QQKPGQAPRLLI | 1270) | NO: | (SEQ | (SEQ | ID | (SEQ |
| | SGAGTYYADSVKG | YGAATRATGIPA | | 1271) | ID NO: | ID | NO: | ID |
| | RFTISRDNSKNTL | RFSGSGSGTEFT | | | 1272) | NO: | 1227) | NO: |
| | YLQMNSLRAEDTA | LTISSLQSEDFA | | | | 1239) | | 1273) |
| | VYYCARERVDWNS | VYYCQQYYKWPI | | | | | | |
| | YIDLWGQGTLVTV | TFGQGTKVEIK | | | | | | |
| | SS (SEQ ID | (SEQ ID NO: | | | | | | |
| | NO: 844) | 845) | | | | | | |
| MIAB105 | EVQLLESGGGLVQ | EIVMTQSPATLS | FTFSSFP | SISGSGA | CAREEV | RASQS | DASTR | CQQYD |
| | PGGSLRLSCAASG | VSPGERATLSCR | MS (SEQ | SIYYA | DWNSYF | VNNNL | AI | TWPPT |
| | FTFSSFPMSWVRQ | ASQSVNNNLAWY | ID NO: | (SEQ ID | DLW | A | (SEQ | F |
| | APGKDLEWSSISG | QQKPGQAPRLLI | 1274) | NO: | (SEQ | (SEQ | ID | (SEQ |
| | SGASIYYADSVKG | YDASTRAIGIPA | | 1275) | ID NO: | ID | NO: | ID |
| | RFTISRDNSKNTL | RFSGSGSGTEFT | | | 1276) | NO: | 1278) | NO: |
| | YLQMNSLRAEDTA | LTISSLQSEDFA | | | | 1277) | | 1279) |
| | VYYCAREEVDWNS | VYYCQQYDTWPP | | | | | | |
| | YFDLWGQGTLVTV | TFGQGTKVEIK | | | | | | |
| | SS (SEQ ID | (SEQ ID NO: | | | | | | |
| | NO: 846) | 847) | | | | | | |
| MIAB106 | EVQLLESGGGLVQ | EIVMTQSPATLS | FTFDDYA | ASITSSS | CARERV | RASQS | GASTR | CQQYY |
| | PGGSLRLSCAASG | VSPGERATLSCR | MH (SEQ | AFIDYA | DWNSYF | VGTDL | AA | TYPPT |
| | FTFDDYAMHWVRQ | ASQSVGTDLAWY | ID NO: | (SEQ ID | DLW | A | (SEQ | F |
| | APGKGLEWVASIT | QQKPGQAPRLLI | 135) | NO: | (SEQ | (SEQ | ID | (SEQ |
| | SSSAFIDYADSVK | YGASTRAAGIPA | | 381) | ID NO: | ID | NO: | ID |
| | GRFTISRDNSKNT | RFSGSGSGTEFT | | | 382) | NO: | 1280) | NO: |
| | LYLQMNSLRAEDT | LTISSLQSEDFA | | | | 1034) | | 652) |
| | AVYYCARERVDWN | VYYCQQYYTYPP | | | | | | |
| | SYFDLWGQGTLVT | TFGQGTKVEIK | | | | | | |
| | VSS (SEQ ID | (SEQ ID NO: | | | | | | |
| | NO: 664) | 848) | | | | | | |
| MIAB107 | EVQLLESGGGLVQ | EIVMTQSPATLS | FIFSDYA | GISGSSG | CAYERV | RASQS | AASIR | CQQYK |
| | PGGSLRLSCAASG | VSPGERATLSCR | MS (SEQ | TIYYA | DWNSYF | VDTNL | AT | TLPHT |
| | FIFSDYAMSWVRQ | ASQSVDTNLAWY | ID NO: | (SEQ ID | DLW | A | (SEQ | F |
| | APGKGLEWSGISG | QQKPGQAPRLLI | 964) | NO: | (SEQ | (SEQ | ID | (SEQ |
| | SSGTIYYADSVKG | YAASIRATGIPA | | 1281) | ID NO: | ID | NO: | ID |
| | RFTISRDNSKNTL | RFSGSGSGTEFT | | | 1282) | NO: | 1284) | NO: |
| | YLQMNSLRAEDTA | LTISSLQSEDFA | | | | 1283) | | 1052) |
| | VYYCAYERVDWNS | VYYCQQYKTLPH | | | | | | |
| | YFDLWGQGTLVTV | TFGQGTKVEIK | | | | | | |
| | SS (SEQ ID | (SEQ ID NO: | | | | | | |
| | NO: 849) | 850) | | | | | | |
| MIAB108 | EVQLLESGGGLVQ | EIVMTQSPATLS | FTFGSYA | TISGSGG | CARERV | RASQS | GVSTR | CQQYY |
| | PGGSLRLSCAASG | VSPGERATLSCR | MS (SEQ | STHYA | DWGSYF | VGSDL | AA | KWPPT |
| | FTFGSYAMSWVRQ | ASQSVGSDLAWY | ID NO: | (SEQ ID | DLW | A | (SEQ | F |
| | APGKGLEWSTISG | QQKPGQAPRLLI | 1285) | NO: | (SEQ | (SEQ | ID | (SEQ |
| | SGGSTHYADSVKG | YGVSTRAAGIPA | | 1286) | ID NO: | ID | NO: | ID |
| | RFTISRDNSKNTL | RFSGSGSGTEFT | | | 1287) | NO: | 1289) | NO: |
| | YLQMNSLRAEDTA | LTISSLQSEDFA | | | | 1288) | | 1290) |
| | VYYCARERVDWGS | VYYCQQYYKWPP | | | | | | |
| | YFDLWGQGTLVTV | TFGQGTKVEIK | | | | | | |
| | SS (SEQ ID | (SEQ ID NO: | | | | | | |
| | NO: 851) | 852) | | | | | | |
| MIAB109 | EVQLLESGGGLVQ | EIVMTQSPATLS | FTFDDYA | ASITSSS | CARERV | RACQG | GASTR | CQQYY |
| | PGGSLRLSCAASG | VSPGERATLSCR | MH (SEQ | AFIDYA | DWNSYF | ISNSY | GT | TYPPT |
| | FTFDDYAMHWVRQ | ACQGISNSYLAW | ID NO: | (SEQ ID | DLW | LA | (SEQ | F |
| | APGKGLEWVASIT | YQQKPGQAPRLL | 135) | NO: | (SEQ | (SEQ | ID | (SEQ |
| | SSSAFIDYADSVK | IYGASTRGTGIP | | 381) | ID NO: | ID | NO: | ID |
| | GRFTISRDNSKNT | ARFSGSGSGTEF | | | 382) | NO: | 1291) | NO: |
| | LYLQMNSLRAEDT | TLTISSLQSEDF | | | | 890) | | 652) |
| | AVYYCARERVDWN | AVYYCQQYYTYP | | | | | | |
| | SYFDLWGQGTLVT | PTFGQGTKVEIK | | | | | | |
| | VSS (SEQ ID | (SEQ ID NO: | | | | | | |
| | NO: 664) | 853) | | | | | | |
| MIAB110 | EVQLLESGGGLVQ | EIVMTQSPATLS | FTFSSYA | AISGSSG | CARERM | RASQS | VASTR | CQQYY |
| | PGGSLRLSCAASG | VSPGERATLSCR | MS (SEQ | STYYA | DWNSYF | IDTNL | AT | SWPKT |
| | FTFSSYAMSWVRQ | ASQSIDTNLAWY | ID NO: | (SEQ ID | DLW | A | (SEQ | F |
| | APGKGLEWSAISG | QQKPGQAPRLLI | 1211) | NO: | (SEQ | (SEQ | ID | (SEQ |
| | SSGSTYYADSVKG | YVASTRATGIPA | | 1292) | ID NO: | ID | NO: | ID |
| | RFTISRDNSKNTL | RFSGSGSGTEFT | | | 1267) | NO: | 1294) | NO: |
| | YLQMNSLRAEDTA | LTISSLQSEDFA | | | | 1293) | | 1101) |
| | VYYCARERMDWNS | VYYCQQYYSWPK | | | | | | |
| | YFDLWGQGTLVTV | TFGQGTKVEIK | | | | | | |
| | SS (SEQ ID | (SEQ ID NO: | | | | | | |
| | NO: 854) | 855) | | | | | | |
| MIAB111 | EVQLLESGGGLVQ | EIVMTQSPATLS | FTFDTYA | SITGSGV | CARESV | RASQS | DASIR | CQQYN |
| | PGGSLRLSCAASG | VSPGERATLSCR | MN (SEQ | STDYA | DWNSYF | VSSNI | AT | KWPPT |
| | FTFDTYAMNWVRQ | ASQSVSSNIAWY | ID NO: | (SEQ ID | DLW | A | (SEQ | F |
| | APGKGLEWSSITG | QQKPGQAPRLLI | 983) | NO: | (SEQ | (SEQ | ID | (SEQ |
| | SGVSTDYADSVKG | YDASIRATGIPA | | 1295) | ID NO: | ID | NO: | ID |
| | RFTISRDNSKNTL | RFSGSGSGTEFT | | | 1296) | NO: | 1298) | NO: |
| | YLQMNSLRAEDTA | LTISSLQSEDFA | | | | 1297) | | 1299) |
| | VYYCARESVDWNS | VYYCQQYNKWPP | | | | | | |
| | YFDLWGQGTLVTV | TFGQGTKVEIK | | | | | | |
| | SS (SEQ ID | (SEQ ID NO: | | | | | | |
| | NO: 856) | 857) | | | | | | |
| MIAB112 | EVQLLESGGGLVQ | EIVMTQSPATLS | FTFRTYA | IITGSGG | CAMERV | RASQS | AASIR | CQQYD |
| | PGGSLRLSCAASG | VSPGERATLSCR | MS (SEQ | STYYA | DWNSYF | VSYKL | DT | TWPLT |
| | FTFRTYAMSWVRQ | ASQSVSYKLAWY | ID NO: | (SEQ ID | DLW | A | (SEQ | F |
| | APGKGLEWSIITG | QQKPGQAPRLLI | 1300) | NO: | (SEQ | (SEQ | ID | (SEQ |
| | SGGSTYYADSVKG | YAASIRDTGIPA | | 1301) | ID NO: | ID | NO: | ID |
| | RFTISRDNSKNTL | RFSGSGSGTEFT | | | 1302) | NO: | 1304) | NO: |
| | YLQMNSLRAEDTA | LTISSLQSEDFA | | | | 1303) | | 1009) |
| | VYYCAMERVDWNS | VYYCQQYDTWPL | | | | | | |
| | YFDLWGQGTLVTV | TFGQGTKVEIK | | | | | | |
| | SS (SEQ ID | (SEQ ID NO: | | | | | | |
| | NO: 858) | 859) | | | | | | |
| MIAB113 | EVQLLESGGGLVQ | EIVMTQSPATLS | FTFSSYS | AISSSGG | CAREMV | RASES | DASTR | CQQYT |
| | PGGSLRLSCAASG | VSPGERATLSCR | MT (SEQ | SIDYA | DWNSYF | VSSNL | AT | TWPYT |
| | FTFSSYSMTWVRQ | ASESVSSNLAWY | ID NO: | (SEQ ID | WLW | A | (SEQ | F |
| | APGKGLEWSAISS | QQKPGQAPRLLI | 1305) | NO: | (SEQ | (SEQ | ID | (SEQ |
| | SGGSIDYADSVKG | YDASTRATGIPA | | 1042) | ID NO: | ID | NO: | ID |
| | RFTISRDNSKNTL | RFSGSGSGTEFT | | | 1306) | NO: | 904) | NO: |
| | YLQMNSLRAEDTA | LTISSLQSEDFA | | | | 1307) | | 1124) |
| | VYYCAREMVDWNS | VYYCQQYTTWPY | | | | | | |
| | YFWLWGQGTLVTV | TFGQGTKVEIK | | | | | | |
| | SS (SEQ ID | (SEQ ID NO: | | | | | | |
| | NO: 860) | 861) | | | | | | |
| MIAB114 | EVQLLESGGGLVQ | EIVMTQSPATLS | FTFRSYA | VISGSGG | CARERV | RASQS | DASTT | CQQYD |
| | PGGSLRLSCAASG | VSPGERATLSCR | MN (SEQ | STYYA | DWNSYF | VSTYL | AT | TWPFT |
| | FTFRSYAMNWVRQ | ASQSVSTYLAWY | ID NO: | (SEQ ID | DLW | A | (SEQ | F |
| | APGKGLEWSVISG | QQKPGQAPRLLI | 1308) | NO: | (SEQ | (SEQ | ID | (SEQ |
| | SGGSTYYADSVKG | YDASTTATGIPA | | 1309) | ID NO: | ID | NO: | ID |
| | RFTISRDNSKNTL | RFSGSGSGTEFT | | | 382) | NO: | 1008) | NO: |
| | YLQMNSLRAEDTA | LTISSLQSEDFA | | | | 1126) | | 1310) |
| | VYYCARERVDWNS | VYYCQQYDTWPF | | | | | | |
| | YFDLWGQGTLVTV | TFGQGTKVEIK | | | | | | |
| | SS (SEQ ID | (SEQ ID NO: | | | | | | |
| | NO: 862) | 863) | | | | | | |
| MIAB115 | EVQLLESGGGLVQ | EIVMTQSPATLS | FTFDDYA | ASITSSS | CARERV | RASQS | GASSR | CQQYN |
| | PGGSLRLSCAASG | VSPGERATLSCR | MH (SEQ | AFIDYA | DWNSYF | ISSHL | AS | IWPPT |
| | FTFDDYAMHWVRQ | ASQSISSHLAWY | ID NO: | (SEQ ID | DLW | A | (SEQ | F |
| | APGKGLEWVASIT | QQKPGQAPRLLI | 135) | NO: | (SEQ | (SEQ | ID | (SEQ |
| | SSSAFIDYADSVK | YGASSRASGIPA | | 381) | ID NO: | ID | NO: | ID |
| | GRFTISRDNSKNT | RFSGSGSGTEFT | | | 382) | NO: | 1312) | NO: |
| | LYLQMNSLRAEDT | LTISSLQSEDFA | | | | 1311) | | 1313) |
| | AVYYCARERVDWN | VYYCQQYNIWPP | | | | | | |
| | SYFDLWGQGTLVT | TFGQGTKVEIK | | | | | | |
| | VSS (SEQ ID | (SEQ ID NO: | | | | | | |
| | NO: 664) | 864) | | | | | | |
| MIAB116 | EVQLLESGGGLVQ | EIVMTQSPATLS | FTFSDYA | AISGTGG | CARERV | RASRS | GGSTR | CQQYY |
| | PGGSLRLSCAASG | VSPGERATLSCR | MN (SEQ | TTYYA | DWNSWF | VSSNL | AT | VWPPT |
| | FTFSDYAMNWVRQ | ASRSVSSNLAWY | ID NO: | (SEQ ID | DLW | A | (SEQ | F |
| | APGKGLEWSAISG | QQKPGQAPRLLI | 1314) | NO: | (SEQ | (SEQ | ID | (SEQ |
| | TGGTTYYADSVKG | YGGSTRATGIPA | | 1315) | ID NO: | ID | NO: | ID |
| | RFTISRDNSKNTL | RFSGSGSGTEFT | | | 1131) | NO: | 1165) | NO: |
| | YLQMNSLRAEDTA | LTISSLQSEDFA | | | | 1316) | | 1317) |
| | VYYCARERVDWNS | VYYCQQYYVWPP | | | | | | |
| | WFDLWGQGTLVTV | TFGQGTKVEIK | | | | | | |
| | SS (SEQ ID | (SEQ ID | | | | | | |
| | NO: 865) | NO: 866) | | | | | | |
| MIAB117 | EVQLLESGGGLVQ | EIVMTQSPATLS | FSFSTYA | TISGSGV | CARERV | RAGQS | GASPR | CQQYD |
| | PGGSLRLSCAASG | VSPGERATLSCR | MT (SEQ | NTYYA | DWNSEF | VSNNL | AT | TSPLT |
| | FSFSTYAMTWVRQ | AGQSVSNNLAWY | ID NO: | (SEQ ID | DLW | A | (SEQ | F |
| | APGKGLEWSTISG | QQKPGQAPRLLI | 1318) | NO: | (SEQ | (SEQ | ID | (SEQ |
| | SGVNTYYADSVKG | YGASPRATGIPA | | 1093) | ID NO: | ID | NO: | ID |
| | RFTISRDNSKNTL | RFSGSGSGTEFT | | | 1319) | NO: | 1321) | NO: |
| | YLQMNSLRAEDTA | LTISSLQSEDFA | | | | 1320) | | 1322) |
| | VYYCARERVDWNS | VYYCQQYDTSPL | | | | | | |
| | EFDLWGQGTLVTV | TFGQGTKVEIK | | | | | | |
| | SS (SEQ ID | (SEQ ID NQ | | | | | | |
| | NO: 867) | 868) | | | | | | |
| MIAB118 | EVQLLESGGGLVQ | EIVMTQSPATLS | FSFGSYA | IISSSGA | CARERL | RASQS | GASSR | CQQYY |
| | PGGSLRLSCAASG | VSPGERATLSCR | MG (SEQ | FTYYA | DWNSYF | VTRNL | AA | NWPPT |
| | FSFGSYAMGWVRQ | ASQSVTRNLAWY | ID NO: | (SEQ ID | DLW | A | (SEQ | F |
| | APGKGLEWSIISS | QQKPGQAPRLLI | 1323) | NO: | (SEQ | (SEQ | ID | (SEQ |
| | SGAFTYYADSVKG | YGASSRAAGIPA | | 1324) | ID NO: | ID | NO: | ID |
| | RFTISRDNSKNTL | RFSGSGSGTEFT | | | 1325) | NO: | 1221) | NO: |
| | YLQMNSLRAEDTA | LTISSLQSEDFA | | | | 924) | | 1326) |
| | VYYCARERLDWNS | VYYCQQYYNWPP | | | | | | |
| | YFDLWGQGTLVTV | TFGQGTKVEIK | | | | | | |
| | SS (SEQ ID | (SEQ ID NO: | | | | | | |
| | NO: 869) | 870) | | | | | | |
| MIAB119 | EVQLLESGGGLVQ | EIVMTQSPATLS | FSFSTYA | AISGGGG | CARERV | RASQS | GASTR | CQQYH |
| | PGGSLRLSCAASG | VSPGERATLSCR | MH (SEQ | STFYA | DWNSTF | VTTNL | AN | KWPPT |
| | FSFSTYAMHWVRQ | ASQSVTTNLAWY | ID NO: | (SEQ ID | DLW | A | (SEQ | F |
| | APGKGLEWSAISG | QQKPGQAPRLLI | 1327) | NO: | (SEQ | (SEQ | ID | (SEQ |
| | GGGSTFYADSVKG | YGASTRANGIPA | | 1328) | ID NO: | ID | NO: | ID |
| | RFTISRDNSKNTL | RFSGSGSGTEFT | | | 1329) | NO: | 1209) | NO: |
| | YLQMNSLRAEDTA | LTISSLQSEDFA | | | | 1330) | | 1331) |
| | VYYCARERVDWNS | VYYCQQYHKWPP | | | | | | |
| | TFDLWGQGTLVTV | TFGQGTKVEIK | | | | | | |
| | SS (SEQ ID | (SEQ ID NO: | | | | | | |
| | NO: 871) | 872) | | | | | | |
| MIAB120 | EVQLLESGGGLVQ | EIVMTQSPATLS | FTFDDYA | ASITSSS | CAREPV | RASQN | DATTR | CQQYY |
| | PGGSLRLSCAASG | VSPGERATLSCR | MH (SEQ | AFIDYA | LWNSYF | VNNNL | AT | HWPQT |
| | FTFDDYAMHWVRQ | ASQNVNNNLAWY | ID NO: | (SEQ ID | DLW | A | (SEQ | F |
| | APGKGLEWVASIT | QQKPGQAPRLLI | 135 | NO: | (SEQ | (SEQ | ID | (SEQ |
| | SSSAFIDYADSVK | YDATTRATGIPA | | 381) | ID NO: | ID | NO: | ID |
| | GRFTISRDNSKNT | RFSGSGSGTEFT | | | 1332) | NO: | 896) | NO: |
| | LYLQMNSLRAEDT | LTISSLQSEDFA | | | | 895) | | 897) |
| | AVYYCAREPVLWN | VYYCQQYYHWPQ | | | | | | |
| | SYFDLWGQGTLVT | TFGQGTKVEIK | | | | | | |
| | VSS (SEQ ID | (SEQ ID NO: | | | | | | |
| | NO: 873) | 677) | | | | | | |
| MIAB121 | EVQLLESGGGLVQ | EIVMTQSPATLS | FIFDDYA | ASITSSS | CARERV | RACPS | DASTR | CQQYS |
| | PGGSLRLSCAASG | VSPGERATLSCR | MH (SEQ | AFIDYA | DWFSYF | VSNNL | AT | HWPPT |
| | FIFDDYAMHWVRQ | ACPSVSNNLVWY | ID NO: | (SEQ ID | DLW | V | (SEQ | F |
| | APGKGLEWVASIT | QQKPGQAPRLLI | 908) | NO: | (SEQ | (SEQ | ID | (SEQ |
| | SSSAFIDYADSVK | YDASTRATGIPA | | 381) | ID NO: | ID | NO: | ID |
| | GRFTISRDNSKNT | RFSGSGSGTEFT | | | 909) | NO: | 904) | NO: |
| | LYLQMNSLRAEDT | LTISSLQSEDFA | | | | 1333) | | 911) |
| | AVYYCARERVDWF | VYYCQQYSHWPP | | | | | | |
| | SYFDLWGQGTLVT | TFGQGTKVEIK | | | | | | |
| | VSS (SEQ ID | (SEQ ID NO: | | | | | | |
| | NO: 688) | 874) | | | | | | |
| MIAB122 | EVQLLESGGGLVQ | EIVMTQSPATLS | FIFDDYA | ASITSSS | CARERV | RACPS | DASTR | CQQYS |
| | PGGSLRLSCAASG | VSPGERATLSCR | MH (SEQ | AFIDYA | DWFSYF | VSNNY | AT | HWPPT |
| | FIFDDYAMHWVRQ | ACPSVSNNYLVW | ID NO: | (SEQ ID | DLW | LV | (SEQ | F |
| | APGKGLEWVASIT | YQQKPGQAPRLL | 908) | NO: | (SEQ | (SEQ | ID | (SEQ |
| | SSSAFIDYADSVK | IYDASTRATGIP | | 381) | ID NO: | ID | NO: | ID |
| | GRFTISRDNSKNT | ARFSGSGSGTEF | | | 909) | NO: | 904) | NO: |
| | LYLQMNSLRAEDT | TLTISSLQSEDF | | | | 1334) | | 911) |
| | AVYYCARERVDWF | AVYYCQQYSHWP | | | | | | |
| | SYFDLWGQGTLVT | PTFGQGTKVEIK | | | | | | |
| | VSS (SEQ ID | (SEQ ID NO: | | | | | | |
| | NO: 688 | 875) | | | | | | |
| MIAB123 | EVQLLESGGGLVQ | EIVMTQSPATLS | FIFDDYA | ASITSSS | CARERV | RASQS | DASTR | CQQYS |
| | PGGSLRLSCAASG | VSPGERATLSCR | MH (SEQ | AFIDYA | DWFSYF | VSNNY | AT | HWPPT |
| | FIFDDYAMHWVRQ | ASQSVSNNYLVW | ID NO: | (SEQ ID | DLW | LV | (SEQ | F |
| | APGKGLEWVASIT | YQQKPGQAPRLL | 908) | NO: | (SEQ | (SEQ | ID | (SEQ |
| | SSSAFIDYADSVK | IYDASTRATGIP | | 381) | ID NO: | ID | NO: | ID |
| | GRFTISRDNSKNT | ARFSGSGSGTEF | | | 909) | NO: | 904) | NO: |
| | LYLQMNSLRAEDT | TLTISSLQSEDF | | | | 1335) | | 911) |
| | AVYYCARERVDWF | AVYYCQQYSHWP | | | | | | |
| | SYFDLWGQGTLVT | PTFGQGTKVEIK | | | | | | |
| | VSS (SEQ ID | (SEQ ID NO: | | | | | | |
| | NO: 688) | 876) | | | | | | |
| MIAB124 | EVQLLESGGGLVQ | EIVMTQSPATLS | FTFSTDA | AISGSGG | CARARV | RASQS | AASTR | CQQYS |
| | PGGSLRLSCAASG | VSPGERATLSCR | MS (SEQ | STYSA | DWNSYN | VNNKL | AT | TWPIT |
| | FTFSTDAMSWVRQ | ASQSVNNKLAWY | ID NO: | (SEQ ID | DLW | A | (SEQ | F |
| | APGKGLEWSAISG | QQKPGQAPRLLI | 1336) | NO: | (SEQ | SEQ | ID | (SEQ |
| | SGGSTYSADSVKG | YAASTRATGIPA | | 1179) | ID NO: | ID | NO: | ID |
| | RFTISRDNSKNTL | RFSGSGSGTEFT | | | 1337) | NO: | 1014) | NO: |
| | YLQMNSLRAEDTA | LTISSLQSEDFA | | | | 1338) | | 1339) |
| | VYYCARARVDWNS | VYYCQQYSTWPI | | | | | | |
| | YNDLWGQGTLVTV | TFGQGTKVEIK | | | | | | |
| | SS (SEQ ID | (SEQ ID NO: | | | | | | |
| | NO: 877) | 878) | | | | | | |
| MIAB125 | EVQLLESGGGLVQ | EIVMTQSPATLS | FTFSNYA | DISGSGG | CARERV | RASQG | GASTR | CQQYY |
| | PGGSLRLSCAASG | VSPGERATLSCR | IS (SEQ | TTYYA | DWNSYF | ISNSY | AT | TYPPT |
| | FTFSNYAISWVRQ | ASQGISNSYLAW | ID NO: | (SEQ ID | DLW | LA | (SEQ | F |
| | APGKGLEWSDISG | YQQKPGQAPRLL | 1340) | NO: | (SEQ | (SEQ | ID | (SEQ |
| | SGGTTYYADSVKG | IYGASTRATGIP | | 1341) | ID NO: | ID | NO: | ID |
| | RFTISRDNSKNTL | ARFSGSGSGTEF | | | 382) | NO: | 241) | NO: |
| | YLQMNSLRAEDTA | TLTISSLQSEDF | | | | 383) | | 652) |
| | VYYCARERVDWNS | AVYYCQQYYTYP | | | | | | |
| | YFDLWGQGTLVTV | PTFGQGTKVEIK | | | | | | |
| | SS (SEQ ID | (SEQ ID NO: | | | | | | |
| | NO: 879) | 663 | | | | | | |
| MIAB126 | EVQLLESGGGLVQ | EIVMTQSPATLS | FTFDDYA | ASITSSS | CARERV | RASQG | GASTR | CQQYY |
| | PGGSLRLSCAASG | VSPGERATLSCR | MH (SEQ | AFIDYA | DWMSYF | ISNSY | AT | TYPPT |
| | FTFDDYAMHWVRQ | ASQGISNSYLAW | ID NO: | (SEQ ID | DLW | LA | (SEQ | F |
| | APGKGLEWVASIT | YQQKPGQAPRLL | 135) | NO: | (SEQ | (SEQ | ID | (SEQ |
| | SSSAFIDYADSVK | IYGASTRATGIP | | 381) | ID NO: | ID | NO: | ID |
| | GRFTISRDNSKNT | ARFSGSGSGTEF | | | 1342) | NO: | 241) | NO: |
| | LYLQMNSLRAEDT | TLTISSLQSEDF | | | | 383) | | 652) |
| | AVYYCARERVDWM | AVYYCQQYYTYP | | | | | | |
| | SYFDLWGQGTLVT | PTFGQGTKVEIK | | | | | | |
| | VSS (SEQ ID | (SEQ ID NO: | | | | | | |
| | NO: 880) | 663) | | | | | | |
| MIAB127 | EVQLLESGGGLVQ | EIVMTQSPATLS | FTFSNYG | SIGGSGG | CARKRV | RASQS | DASTG | CQQYY |
| | PGGSLRLSCAASG | VSPGERATLSCR | MT (SEQ | STYYA | DWISYF | VTSKL | AT | DIPET |
| | FTFSNYGMTWVRQ | ASQSVTSKLAWY | ID NO: | (SEQ ID | DLW | A | (SEQ | F |
| | APGKGLEWSSIGG | QQKPGQAPRLLI | 1343) | NO: | (SEQ | (SEQ | ID | (SEQ |
| | SGGSTYYADSVKG | YDASTGATGIPA | | 1344) | ID NO: | ID | NO: | ID |
| | RFTISRDNSKNTL | RFSGSGSGTEFT | | | 1345) | NO: | 627) | NO: |
| | YLQMNSLRAEDTA | LTISSLQSEDFA | | | | 1072) | | 1057) |
| | VYYCARKRVDWIS | VYYCQQYYDIPE | | | | | | |
| | YFDLWGQGTLVTV | TFGQGTKVEIK | | | | | | |
| | SS (SEQ ID | (SEQ ID NO: | | | | | | |
| | NO: 881) | 882) | | | | | | |
| MIAB128 | EVQLLESGGGLVQ | DIQMTQSPSSLS | FTFSDFW | SYISGDS | CARDRP | RASQS | SSLQS | QQYKS |
| | PGGSLRLSCAASG | ASVGDRVTITCR | MH (SEQ | GYTNYA | NYYYMD | VSRSL | (SEQ | YPVT |
| | FTFSDFWMHWVRQ | ASQSVSRSLAWY | ID NO: | (SEQ ID | VW | A | ID | (SEQ |
| | APGKGLEWISYIS | QQKPGKAPKLLI | 359) | NO: | (SEQ | (SEQ | NO: | ID |
| | GDSGYTNYADSVK | YAASSLQSGVPS | | 170) | ID NO: | ID | 362) | NO: |
| | GRFTISRDNSKNT | RFSGSGSGTDFT | | | 1399) | NO: | | 363) |
| | LYLQMNSLRAEDT | LTISSLQPEDFA | | | | 361) | | |
| | AVYYCARDRPNYY | TYYCQQYKSYPV | | | | | | |
| | YMDVWGKGTTVTV | TFGQGTKVEIK | | | | | | |
| | SS (SEQ ID | (SEQ ID NO: | | | | | | |
| | NO: 1346) | 592) | | | | | | |
| MIAB128 | EVQLLESGGGLVQ | DIQMTQSPSSLS | FTFSDFW | SYISGDS | CARDRP | RASQS | SSLQS | QQYKS |
| A | PGGSLRLSCAASG | ASVGDRVTITCR | MH (SEQ | GYTNYA | QYYYMD | VSRSL | (SEQ | YPVT |
| | FTFSDFWMHWVRQ | ASQSVSRSLAWY | ID NO: | (SEQ ID | VW | A | ID | (SEQ |
| | APGKGLEWISYIS | QQKPGKAPKLLI | 359) | NO: | (SEQ | (SEQ | NO: | ID |
| | GDSGYTNYADSVK | YAASSLQSGVPS | | 170) | ID NO: | ID | 362) | NO: |
| | GRFTISRDNSKNT | RFSGSGSGTDFT | | | 1400) | NO: | | 363) |
| | LYLQMNSLRAEDT | LTISSLQPEDFA | | | | 361) | | |
| | AVYYCARDRPQYY | TYYCQQYKSYPV | | | | | | |
| | YMDVWGKGTTVTV | TFGQGTKVEIK | | | | | | |
| | SS (SEQ ID | (SEQ ID NO: | | | | | | |
| | NO: 1348) | 592) | | | | | | |
| MIAB129 | EVQLLESGGGLVQ | DIQMTQSPSSLS | FTFSDFW | SYISGDS | CARDRP | RASQS | SSLQS | QQYKS |
| | PGGSLRLSCAASG | ASVGDRVTITCR | MH (SEQ | GYTNYA | GYYYMD | VSRSL | (SEQ | YPVT |
| | FTFSDFWMHWVRQ | ASQSVSRSLAWY | ID NO: | (SEQ ID | VW | A | ID | (SEQ |
| | APGKGLEWISYIS | QQKPGKAPKLLI | 359) | NO: | (SEQ | (SEQ | NO: | ID |
| | GDSGYTNYADSVK | YAASSLQSGVPS | | 170) | ID NO: | ID | 362) | NO: |
| | GRFTISRDNSKNT | RFSGSGSGTDFT | | | 1401) | NO: | | 363) |
| | LYLQMNSLRAEDT | LTISSLQPEDFA | | | | 361) | | |
| | AVYYCARDRPGYY | TYYCQQYKSYPV | | | | | | |
| | YMDVWGKGTTVTV | TFGQGTKVEIK | | | | | | |
| | SS (SEQ ID | (SEQ ID NO: | | | | | | |
| | NO: 1349) | 592) | | | | | | |
| MIAB130 | EVQLLESGGGLVQ | DIQMTQSPSSLS | FTFSDFW | SYISGDS | CARDRP | RASQS | SSLQS | QQYKS |
| | PGGSLRLSCAASG | ASVGDRVTITCR | MH (SEQ | GYTNYA | YYYQMD | VSRSL | (SEQ | YPVT |
| | FTFSDFWMHWVRQ | ASQSVSRSLAWY | ID NO: | (SEQ ID | VW | A | ID | (SEQ |
| | APGKGLEWISYIS | QQKPGKAPKLLI | 359) | NO: | (SEQ | (SEQ | NO: | ID |
| | GDSGYTNYADSVK | YAASSLQSGVPS | | 170) | ID NO: | ID | 362) | NO: |
| | GRFTISRDNSKNT | RFSGSGSGTDFT | | | 1402) | NO: | | 363) |
| | LYLQMNSLRAEDT | LTISSLQPEDFA | | | | 361) | | |
| | AVYYCARDRPYYY | TYYCQQYKSYPV | | | | | | |
| | QMDVWGKGTTVTV | TFGQGTKVEIK | | | | | | |
| | SS (SEQ ID | (SEQ ID NO: | | | | | | |
| | NO: 1350) | 592) | | | | | | |
| MIAB131 | EVQLLESGGGLVQ | DIQMTQSPSSLS | FTFSDFW | SYISGDS | CARDRP | RASQS | SSLQS | QQYKS |
| | PGGSLRLSCAASG | ASVGDRVTITCR | MH (SEQ | GYTNYA | YYYGMD | VSRSL | (SEQ | YPVT |
| | FTFSDFWMHWVRQ | ASQSVSRSLAWY | ID NO: | (SEQ ID | VW | A | ID | (SEQ |
| | APGKGLEWISYIS | QQKPGKAPKLLI | 359) | NO: | (SEQ | (SEQ | NO: | ID |
| | GDSGYTNYADSVK | YAASSLQSGVPS | | 170) | ID NO: | ID | 362) | NO: |
| | GRFTISRDNSKNT | RFSGSGSGTDFT | | | 1403) | NO: | | 363) |
| | LYLQMNSLRAEDT | LTISSLQPEDFA | | | | 361) | | |
| | AVYYCARDRPYYY | TYYCQQYKSYPV | | | | | | |
| | GMDVWGKGTTVTV | TFGQGTKVEIK | | | | | | |
| | SS (SEQ ID | (SEQ ID NO: | | | | | | |
| | NO: 1351) | 592) | | | | | | |
| MIAB132 | EVQLLESGGGLVQ | DIQMTQSPSSLS | FTFSNFW | SYISGDS | CARDRP | RASQS | SSLQS | QQYKS |
| | PGGSLRLSCAASG | ASVGDRVTITCR | MH (SEQ | GYTNYA | YYYYMD | VSRSL | (SEQ | YPVT |
| | FTFSNFWMHWVRQ | ASQSVSRSLAWY | ID NO: | (SEQ ID | VW | A | ID | (SEQ |
| | APGKGLEWISYIS | QQKPGKAPKLLI | 1404) | NO: | (SEQ | (SEQ | NO: | ID |
| | GDSGYTNYADSVK | YAASSLQSGVPS | | 170) | ID NO: | ID | 362) | NO: |
| | GRFTISRDNSKNT | RFSGSGSGTDFT | | | 360) | NO: | | 363) |
| | LYLQMNSLRAEDT | LTISSLQPEDFA | | | | 361) | | |
| | AVYYCARDRPYYY | TYYCQQYKSYPV | | | | | | |
| | YMDVWGKGTTVTV | TFGQGTKVEIK | | | | | | |
| | SS (SEQ ID | (SEQ ID NO: | | | | | | |
| | NO: 1352) | 592) | | | | | | |
| MIAB133 | EVQLLESGGGLVQ | DIQMTQSPSSLS | FTFSSFW | SYISGDS | CARDRP | RASQS | SSLQS | QQYKS |
| | PGGSLRLSCAASG | ASVGDRVTITCR | MH (SEQ | GYTNYA | YYYYMD | VSRSL | (SEQ | YPVT |
| | FTFSSFWMHWVRQ | ASQSVSRSLAWY | ID NO: | (SEQ ID | VW | A | ID | (SEQ |
| | APGKGLEWISYIS | QQKPGKAPKLLI | 1405) | NO: | SEQ | (SEQ | NO: | ID |
| | GDSGYTNYADSVK | YAASSLQSGVPS | | 170) | ID NO: | ID | 362) | NO: |
| | GRFTISRDNSKNT | RFSGSGSGTDFT | | | 360) | NO: | | 363 |
| | LYLQMNSLRAEDT | LTISSLQPEDFA | | | | 361) | | |
| | AVYYCARDRPYYY | TYYCQQYKSYPV | | | | | | |
| | YMDVWGKGTTVTV | TFGQGTKVEIK | | | | | | |
| | SS (SEQ ID | (SEQ ID NO: | | | | | | |
| | NO: 1353) | 592) | | | | | | |
| MIAB134 | EVQLLESGGGLVQ | DIQMTQSPSSLS | FTFSAFW | SYISGDS | CARDRP | RASQS | SSLQS | QQYKS |
| | PGGSLRLSCAASG | ASVGDRVTITCR | MH (SEQ | GYTNYA | YYYYMD | VSRSL | (SEQ | YPVT |
| | FTFSAFWMHWVRQ | ASQSVSRSLAWY | ID NO: | (SEQ ID | VW | A | ID | (SEQ |
| | APGKGLEWISYIS | QQKPGKAPKLLI | 1406) | NO: | (SEQ | (SEQ | NO: | ID |
| | GDSGYTNYADSVK | YAASSLQSGVPS | | 170) | ID NO: | ID | 362) | NO: |
| | GRFTISRDNSKNT | RFSGSGSGTDFT | | | 360) | NO: | | 363) |
| | LYLQMNSLRAEDT | LTISSLQPEDFA | | | | 361) | | |
| | AVYYCARDRPYYY | TYYCQQYKSYPV | | | | | | |
| | YMDVWGKGTTVTV | TFGQGTKVEIK | | | | | | |
| | SS (SEQ ID | (SEQ ID NO: | | | | | | |
| | NO: 1354) | 592) | | | | | | |
| MIAB135 | EVQLLESGGGLVQ | DIQMTQSPSSLS | FTFSDFW | SYISGDS | CARDRP | RASQS | SSLQS | QQYKS |
| | PGGSLRLSCAASG | ASVGDRVTITCR | MH (SEQ | GYTNYA | YYYYMD | VSRSL | (SEQ | YPVT |
| | FTFSDFWMHWVRQ | ASQSVSRSLAWY | ID NO: | (SEQ ID | VW | A | ID | (SEQ |
| | APGKGLEWISYIS | QQKPGKAPKLLI | 359) | NO: | (SEQ | (SEQ | NO: | ID |
| | GDSGYTNYADSVK | YAASSLQSGVPS | | 170) | ID NO: | ID | 362) | NO: |
| | GRFTISRDNSNNT | RFSGSGSGTDFT | | | 360) | NO: | | 363) |
| | LYLQMNSLRAEDT | LTISSLQPEDFA | | | | 361) | | |
| | AVYYCARDRPYYY | TYYCQQYKSYPV | | | | | | |
| | YMDVWGKGTTVTV | TFGQGTKVEIK | | | | | | |
| | SS (SEQ ID | (SEQ ID NO: | | | | | | |
| | NO: 1355) | 592) | | | | | | |
| MIAB136 | EVQLLESGGGLVQ | DIQMTQSPSSLS | FTFSSYA | SYISGDS | CARDRP | RASQS | SSLQS | QQYKS |
| | PGGSLRLSCAASG | ASVGDRVTITCR | MS (SEQ | GYTNYA | YYYYMD | VSRSL | (SEQ | YPVT |
| | FTFSSYAMSWVRQ | ASQSVSRSLAWY | ID NO: | (SEQ ID | VW | A | ID | (SEQ |
| | APGKGLEWISYIS | QQKPGKAPKLLI | 473) | NO: | (SEQ | (SEQ | NO: | ID |
| | GDSGYTNYADSVK | YAASSLQSGVPS | | 170) | ID NO: | ID | 362) | NO: |
| | GRFTISRDNSKNT | RFSGSGSGTDFT | | | 360) | NO: | | 363) |
| | LYLQMNSLRAEDT | LTISSLQPEDFA | | | | 361) | | |
| | AVYYCARDRPYYY | TYYCQQYKSYPV | | | | | | |
| | YMDVWGKGTTVTV | TFGQGTKVEIK | | | | | | |
| | SS (SEQ ID | (SEQ ID NO: | | | | | | |
| | NO: 1356) | 592) | | | | | | |
| MIAB137 | EVQLLESGGGLVQ | DIQMTQSPSSLS | FTFSDFW | SAISGSG | CARDRP | RASQS | SSLQS | QQYKS |
| | PGGSLRLSCAASG | ASVGDRVTITCR | MH (SEQ | GSTYYA | YYYYMD | VSRSL | (SEQ | YPVT |
| | FTFSDFWMHWVRQ | ASQSVSRSLAWY | ID NO: | (SEQ ID | VW | A | ID | (SEQ |
| | APGKGLEWVSAIS | QQKPGKAPKLLI | 359) | NO: | (SEQ | (SEQ | NO: | ID |
| | GSGGSTYYADSVK | YAASSLQSGVPS | | 103) | ID NO: | ID | 362) | NO: |
| | GRFTISRDNSKNT | RFSGSGSGTDFT | | | 360) | NO: | | 363) |
| | LYLQMNSLRAEDT | LTISSLQPEDFA | | | | 361) | | |
| | AVYYCARDRPYYY | TYYCQQYKSYPV | | | | | | |
| | YMDVWGKGTTVTV | TFGQGTKVEIK | | | | | | |
| | SS (SEQ ID | (SEQ ID NO: | | | | | | |
| | NO: 1357) | 592) | | | | | | |
| MIAB138 | EVQLLESGGGLVQ | DIQMTQSPSSLS | FTFSSYA | SAISGSG | CARDRP | RASQS | SSLQS | QQYKS |
| | PGGSLRLSCAASG | ASVGDRVTITCR | MS (SEQ | GSTYYA | YYYYMD | VSRSL | (SEQ | YPVT |
| | FTFSSYAMSWVRQ | ASQSVSRSLAWY | ID NO: | (SEQ ID | VW | A | ID | (SEQ |
| | APGKGLEWVSAIS | QQKPGKAPKLLI | 473) | NO: | (SEQ | (SEQ | NO: | ID |
| | GSGGSTYYADSVK | YAASSLQSGVPS | | 103) | ID NO: | ID | 362) | NO: |
| | GRFTISRDNSKNT | RFSGSGSGTDFT | | | 360 | NO: | | 363) |
| | LYLQMNSLRAEDT | LTISSLQPEDFA | | | | 361) | | |
| | AVYYCARDRPYYY | TYYCQQYKSYPV | | | | | | |
| | YMDVWGKGTTVTV | TFGQGTKVEIK | | | | | | |
| | SS (SEQ ID | (SEQ ID NO: | | | | | | |
| | NO: 1358) | 592) | | | | | | |
| MIAB139 | EVQLLESGGGLVQ | DIQMTQSPSSLS | FTFSDFW | SYISGDS | CARDRP | RASQS | SSLQS | QQSYS |
| | PGGSLRLSCAASG | ASVGDRVTITCR | MH (SEQ | GYTNYA | YYYYMD | ISSYL | (SEQ | TPRT |
| | FTFSDFWMHWVRQ | ASQSISSYLNWY | ID NO: | (SEQ ID | VW | N | ID | (SEQ |
| | APGKGLEWISYIS | QQKPGKAPKLLI | 359) | NO: | (SEQ | (SEQ | NO: | ID |
| | GDSGYTNYADSVK | YAASSLQSGVPS | | 170) | ID NO: | ID | 362) | NO: |
| | GRFTISRDNSKNT | RFSGSGSGTDFT | | | 360) | NO: | | 1407) |
| | LYLQMNSLRAEDT | LTISSLQPEDFA | | | | 172) | | |
| | AVYYCARDRPYYY | TYYCQQSYSTPR | | | | | | |
| | YMDVWGKGTTVTV | TFGQGTKVEIK | | | | | | |
| | SS (SEQ ID | (SEQ ID NO: | | | | | | |
| | NO: 591) | 1360) | | | | | | |
| MIAB140 | EVQLLESGGGLVQ | DIQMTQSPSSLS | FTFSSYA | SAISGSG | CARDRP | RASQS | SSLQS | QQSYS |
| | PGGSLRLSCAASG | ASVGDRVTITCR | MS (SEQ | GSTYYA | YYYYMD | ISSYL | (SEQ | TPRT |
| | FTFSSYAMSWVRQ | ASQSISSYLNWY | ID NO: | (SEQ ID | VW | N | ID | (SEQ |
| | APGKGLEWVSAIS | QQKPGKAPKLLI | 473) | NO: | (SEQ | (SEQ | NO: | ID |
| | GSGGSTYYADSVK | YAASSLQSGVPS | | 103) | ID NO: | ID | 362) | NO: |
| | GRFTISRDNSKNT | RFSGSGSGTDFT | | | 360) | NO: | | 1407) |
| | LYLQMNSLRAEDT | LTISSLQPEDFA | | | | 172) | | |
| | AVYYCARDRPYYY | TYYCQQSYSTPR | | | | | | |
| | YMDVWGKGTTVTV | TFGQGTKVEIK | | | | | | |
| | SS (SEQ ID | (SEQ ID NO: | | | | | | |
| | NO: 1358) | 1360) | | | | | | |
| MIAB141 | EVQLLESGGGLVQ | DIQMTQSPSSLS | FTFSDFW | SYISGDS | CARDRP | RASQS | SSLQS | QQYKS |
| | PGGSLRLSCAASG | ASVGDRVTITCR | MH (SEQ | GYTNYA | YYYYMD | ISSYL | (SEQ | YPVT |
| | FTFSDFWMHWVRQ | ASQSISSYLNWY | ID NO: | (SEQ ID | VW | N | ID | (SEQ |
| | APGKGLEWISYIS | QQKPGKAPKLLI | 359) | NO: | (SEQ | (SEQ | NO: | ID |
| | GDSGYTNYADSVK | YAASSLQSGVPS | | 170) | ID NO: | ID | 362) | NO: |
| | GRFTISRDNSKNT | RFSGSGSGTDFT | | | 360) | NO: | | 363) |
| | LYLQMNSLRAEDT | LTISSLQPEDFA | | | | 172) | | |
| | AVYYCARDRPYYY | TYYCQQYKSYPV | | | | | | |
| | YMDVWGKGTTVTV | TFGQGTKVEIK | | | | | | |
| | SS (SEQ ID | (SEQ ID NO: | | | | | | |
| | NO: 591) | 1361) | | | | | | |
| MIAB142 | EVQLLESGGGLVQ | DIQMTQSPSSLS | FTFSDFW | SYISGDS | CARDRP | RASQS | SSLQS | QQSYS |
| | PGGSLRLSCAASG | ASVGDRVTITCR | MH (SEQ | GYTNYA | YYYYMD | VSRSL | (SEQ | TPRT |
| | FTFSDFWMHWVRQ | ASQSVSRSLAWY | ID NO: | (SEQ ID | VW | A | ID | (SEQ |
| | APGKGLEWISYIS | QQKPGKAPKLLI | 359) | NO: | (SEQ | (SEQ | NO: | ID |
| | GDSGYTNYADSVK | YAASSLQSGVPS | | 170) | ID NO: | ID | 362) | NO: |
| | GRFTISRDNSKNT | RFSGSGSGTDFT | | | 360) | NO: | | 1407) |
| | LYLQMNSLRAEDT | LTISSLQPEDFA | | | | 361) | | |
| | AVYYCARDRPYYY | TYYCQQSYSTPR | | | | | | |
| | YMDVWGKGTTVTV | TFGQGTKVEIK | | | | | | |
| | SS (SEQ ID | (SEQ ID NO: | | | | | | |
| | NO: 591) | 1362) | | | | | | |
| MIAB143 | EVQLLESGGGLVQ | DIQMTQSPSSLS | FTFSDFW | SYISGDS | CARDRP | RASQS | SSLQS | QQYKS |
| | PGGSLRLSCAASG | ASVGDRVTITCR | MH (SEQ | GYTNYA | YYYYMD | VSRSL | SEQ | YPVT |
| | FTFSDFWMHWVRQ | ASQSVSRSLAWY | ID NO: | (SEQ ID | VW | A | ID | (SEQ |
| | APGKGLEWISYIS | QQKPGKAPKLLI | 359) | NO: | (SEQ | (SEQ | NO: | ID |
| | GDSGYTNYADSVK | YAASSLQSGVPS | | 170) | ID NO: | ID | 362) | NO: |
| | GRFTISRDNSKNT | RFSGSGSGTDFT | | | 360) | NO: | | 363) |
| | LYLQMNSLRAEDT | LTISSLQPEDFA | | | | 361) | | |
| | AVYYCARDRPYYY | TYYCQQYKSYPV | | | | | | |
| | YMDVWGKGTTVTV | TFGQGTKVEIK | | | | | | |
| | SS (SEQ ID | (SEQ ID NO: | | | | | | |
| | NO: 591) | 592) | | | | | | |
| MIAB144 | EVQLLESGGGLVQ | DIQMTQSPSSLS | FTFSDFW | SYISGDS | CARDRP | RASQS | SSLQS | QQYKS |
| | PGGSLRLSCAASG | ASVGDRVTITCR | MH (SEQ | GYTNYA | YYYYMD | VSRSL | (SEQ | YPVT |
| | FTFSDFWMHWVRQ | ASQSVSRSLAWY | ID NO: | (SEQ ID | VW | A | ID | (SEQ |
| | APGKGLEWISYIS | QQKPGKAPKLLI | 359) | NO: | (SEQ | (SEQ | NO: | ID |
| | GDSGYTNYADSVK | YAASSLQSGVPS | | 170) | ID NO: | ID | 362) | NO: |
| | GRFTISRDNSKNT | RFSGSGSGTDFT | | | 360) | NO: | | 363) |
| | LYLQMNSLRAEDT | LTISSLQPEDFA | | | | 361) | | |
| | AVYYCARDRPYYY | TYYCQQYKSYPV | | | | | | |
| | YMDVWGKGTTVTV | TFGQGTKVEIK | | | | | | |
| | SS (SEQ ID | (SEQ ID NO: | | | | | | |
| | NO: 591) | 592) | | | | | | |
| MIAB145 | EVQLLESGGGLVQ | DIQMTQSPSSLS | FTFSDFW | SYISGDS | CARDRP | RASQS | SSLQS | QQYKS |
| | PGGSLRLSCAASG | ASVGDRVTITCR | MH (SEQ | GYTNYA | YYYYMD | ISRSL | (SEQ | YPVT |
| | FTFSDFWMHWVRQ | ASQSISRSLAWY | ID NO: | (SEQ ID | VW | A | ID | (SEQ |
| | APGKGLEWISYIS | QQKPGKAPKLLI | 359) | NO: | (SEQ | (SEQ | NO: | ID |
| | GDSGYTNYADSVK | YAASSLQSGVPS | | 170) | ID NO: | ID | 362) | NO: |
| | GRFTISRDNSKNT | RFSGSGSGTDFT | | | 360) | NO: | | 363) |
| | LYLQMNSLRAEDT | LTISSLQPEDFA | | | | 1408) | | |
| | AVYYCARDRPYYY | TYYCQQYKSYPV | | | | | | |
| | YMDVWGKGTTVTV | TFGQGTKVEIK | | | | | | |
| | SS (SEQ ID | (SEQ ID NO: | | | | | | |
| | NO: 591) | 1363) | | | | | | |
| MIAB146 | EVQLLESGGGLVQ | DIQMTQSPSSLS | FTFSDFW | SYISGDS | CARDRP | RASQS | SSLQS | QQYKS |
| | PGGSLRLSCAASG | ASVGDRVTITCR | MH (SEQ | GYTNYA | YYYYMD | VSSSL | (SEQ | YPVT |
| | FTFSDFWMHWVRQ | ASQSVSSSLAWY | ID NO: | (SEQ ID | VW | A | ID | (SEQ |
| | APGKGLEWISYIS | QQKPGKAPKLLI | 359) | NO: | (SEQ | (SEQ | NO: | ID |
| | GDSGYTNYADSVK | YAASSLQSGVPS | | 170) | ID NO: | ID | 362) | NO: |
| | GRFTISRDNSKNT | RFSGSGSGTDFT | | | 360) | NO: | | 363) |
| | LYLQMNSLRAEDT | LTISSLQPEDFA | | | | 1409) | | |
| | AVYYCARDRPYYY | TYYCQQYKSYPV | | | | | | |
| | YMDVWGKGTTVTV | TFGQGTKVEIK | | | | | | |
| | SS (SEQ ID | (SEQ ID NO: | | | | | | |
| | NO: 591) | 1364) | | | | | | |
| MIAB147 | EVQLLESGGGLVQ | DIQMTQSPSSLS | FTFSDFW | SYISGDS | CARDRP | RASQS | SSLQS | QQYKS |
| | PGGSLRLSCAASG | ASVGDRVTITCR | MH (SEQ | GYTNYA | YYYYMD | VSRYL | (SEQ | YPVT |
| | FTFSDFWMHWVRQ | ASQSVSRYLAWY | ID NO: | (SEQ ID | VW | A | ID | (SEQ |
| | APGKGLEWISYIS | QQKPGKAPKLLI | 359) | NO: | (SEQ | (SEQ | NO: | ID |
| | GDSGYTNYADSVK | YAASSLQSGVPS | | 170) | ID NO: | ID | 362) | NO: |
| | GRFTISRDNSKNT | RFSGSGSGTDFT | | | 360) | NO: | | 363) |
| | LYLQMNSLRAEDT | LTISSLQPEDFA | | | | 1410) | | |
| | AVYYCARDRPYYY | TYYCQQYKSYPV | | | | | | |
| | YMDVWGKGTTVTV | TFGQGTKVEIK | | | | | | |
| | SS (SEQ ID | (SEQ ID NO: | | | | | | |
| | NO: 591) | 1365) | | | | | | |
| MIAB148 | EVQLLESGGGLVQ | DIQMTQSPSSLS | FTFSDFW | SYISGDS | CARDRP | RASQS | SSLQS | QQYKS |
| | PGGSLRLSCAASG | ASVGDRVTITCR | MH (SEQ | GYTNYA | YYYYMD | VSRSL | (SEQ | YPVT |
| | FTFSDFWMHWVRQ | ASQSVSRSLNWY | ID NO: | (SEQ ID | VW | N | ID | (SEQ |
| | APGKGLEWISYIS | QQKPGKAPKLLI | 359) | NO: | (SEQ | (SEQ | NO: | ID |
| | GDSGYTNYADSVK | YAASSLQSGVPS | | 170) | ID NO: | ID | 362) | NO: |
| | GRFTISRDNSKNT | RFSGSGSGTDFT | | | 360) | NO: | | 363) |
| | LYLQMNSLRAEDT | LTISSLQPEDFA | | | | 1411) | | |
| | AVYYCARDRPYYY | TYYCQQYKSYPV | | | | | | |
| | YMDVWGKGTTVTV | TFGQGTKVEIK | | | | | | |
| | SS (SEQ ID | (SEQ ID NO: | | | | | | |
| | NO: 591) | 1366) | | | | | | |
| MIAB149 | EVQLLESGGGLVQ | DIQMTQSPSSLS | FTFSDFW | SYISGDS | CARDRP | RASQS | SSLQS | QQYKS |
| | PGGSLRLSCAASG | ASVGDRVTITCR | MH (SEQ | GYTNYA | YYYYMD | ISSSL | (SEQ | YPVT |
| | FTFSDFWMHWVRQ | ASQSISSSLAWY | ID NO: | (SEQ ID | VW | A | ID | (SEQ |
| | APGKGLEWISYIS | QQKPGKAPKLLI | 359) | NO: | (SEQ | (SEQ | NO: | ID |
| | GDSGYTNYADSVK | YAASSLQSGVPS | | 170) | ID NO: | ID | 362) | NO: |
| | GRFTISRDNSKNT | RFSGSGSGTDFT | | | 360) | NO: | | 363) |
| | LYLQMNSLRAEDT | LTISSLQPEDFA | | | | 1412) | | |
| | AVYYCARDRPYYY | TYYCQQYKSYPV | | | | | | |
| | YMDVWGKGTTVTV | TFGQGTKVEIK | | | | | | |
| | SS (SEQ ID | (SEQ ID NO: | | | | | | |
| | NO: 591) | 1367) | | | | | | |
| MIAB150 | EVQLLESGGGLVQ | DIQMTQSPSSLS | FTFSDFW | SYISGDS | CARDRP | RASQS | SSLQS | QQYKS |
| | PGGSLRLSCAASG | ASVGDRVTITCR | MH (SEQ | GYTNYA | YYYYMD | ISRYL | (SEQ | YPVT |
| | FTFSDFWMHWVRQ | ASQSISRYLAWY | ID NO: | (SEQ ID | VW | A | ID | (SEQ |
| | APGKGLEWISYIS | QQKPGKAPKLLI | 359) | NO: | (SEQ | (SEQ | NO: | ID |
| | GDSGYTNYADSVK | YAASSLQSGVPS | | 170) | ID NO: | ID | 362) | NO: |
| | GRFTISRDNSKNT | RFSGSGSGTDFT | | | 360) | NO: | | 363) |
| | LYLQMNSLRAEDT | LTISSLQPEDFA | | | | 1413) | | |
| | AVYYCARDRPYYY | TYYCQQYKSYPV | | | | | | |
| | YMDVWGKGTTVTV | TFGQGTKVEIK | | | | | | |
| | SS (SEQ ID | (SEQ ID NO: | | | | | | |
| | NO: 591) | 1368) | | | | | | |
| MIAB151 | EVQLLESGGGLVQ | DIQMTQSPSSLS | FTFSDFW | SYISGDS | CARDRP | RASQS | SSLQS | QQYKS |
| | PGGSLRLSCAASG | ASVGDRVTITCR | MH (SEQ | GYTNYA | YYYYMD | ISRSL | (SEQ | YPVT |
| | FTFSDFWMHWVRQ | ASQSISRSLNWY | ID NO: | (SEQ ID | VW | N | ID | (SEQ |
| | APGKGLEWISYIS | QQKPGKAPKLLI | 359) | NO: | (SEQ | (SEQ | NO: | ID |
| | GDSGYTNYADSVK | YAASSLQSGVPS | | 170) | ID NO: | ID | 362) | NO: |
| | GRFTISRDNS KNT | RFSGSGSGTDFT | | | 360) | NO: | | 363) |
| | LYLQMNSLRAEDT | LTISSLQPEDFA | | | | 1414) | | |
| | AVYYCARDRPYYY | TYYCQQYKSYPV | | | | | | |
| | YMDVWGKGTTVTV | TFGQGTKVEIK | | | | | | |
| | SS (SEQ ID | (SEQ ID NO: | | | | | | |
| | NO: 591 | 1369) | | | | | | |
| MIAB152 | EVQLLESGGGLVQ | DIQMTQSPSSLS | FTFSDFW | SYISGDS | CARDRP | RASQS | SSLQS | QQYKS |
| | PGGSLRLSCAASG | ASVGDRVTITCR | MH (SEQ | GYTNYA | YYYYMD | VSSYL | (SEQ | YPVT |
| | FTFSDFWMHWVRQ | ASQSVSSYLAWY | ID NO: | (SEQ ID | VW | A | ID | (SEQ |
| | APGKGLEWISYIS | QQKPGKAPKLLI | 359) | NO: | (SEQ | (SEQ | NO: | ID |
| | GDSGYTNYADSVK | YAASSLQSGVPS | | | ID NO: | ID | 362) | NO: |
| | GRFTISRDNSKNT | RFSGSGSGTDFT | | 170) | 360) | NO: | | 363) |
| | LYLQMNSLRAEDT | LTISSLQPEDFA | | | | 1415) | | |
| | AVYYCARDRPYYY | TYYCQQYKSYPV | | | | | | |
| | YMDVWGKGTTVTV | TFGQGTKVEIK | | | | | | |
| | SS (SEQ ID | (SEQ ID NO: | | | | | | |
| | NO: 591) | 1370) | | | | | | |
| MIAB153 | EVQLLESGGGLVQ | DIQMTQSPSSLS | FTFSDFW | SYISGDS | CARDRP | RASQS | SSLQS | QQYKS |
| | PGGSLRLSCAASG | ASVGDRVTITCR | MH (SEQ | GYTNYA | YYYYMD | VSSSL | (SEQ | YPVT |
| | FTFSDFWMHWVRQ | ASQSVSSSLNWY | ID NO: | (SEQ ID | VW | N | ID | (SEQ |
| | APGKGLEWISYIS | QQKPGKAPKLLI | 359) | NO: | (SEQ | (SEQ | NO: | ID |
| | GDSGYTNYADSVK | YAASSLQSGVPS | | 170) | ID NO: | ID | 362) | NO: |
| | GRFTISRDNSKNT | RFSGSGSGTDFT | | | 360) | NO: | | 363) |
| | LYLQMNSLRAEDT | LTISSLQPEDFA | | | | 1416) | | |
| | AVYYCARDRPYYY | TYYCQQYKSYPV | | | | | | |
| | YMDVWGKGTTVTV | TFGQGTKVEIK | | | | | | |
| | SSV (SEQ ID | (SEQ ID NO: | | | | | | |
| | NO: 1548) | 1371) | | | | | | |
| MIAB154 | EVQLLESGGGLVQ | DIQMTQSPSSLS | FTFSDFW | SYISGDS | CARDRP | RASQS | SSLQS | QQYKS |
| | PGGSLRLSCAASG | ASVGDRVTITCR | MH (SEQ | GYTNYA | YYYYMD | VSRYL | (SEQ | YPVT |
| | FTFSDFWMHWVRQ | ASQSVSRYLNWY | ID NO: | (SEQ ID | VW | N | ID | (SEQ |
| | APGKGLEWISYIS | QQKPGKAPKLLI | 359) | NO: | (SEQ | (SEQ | NO: | ID |
| | GDSGYTNYADSVK | YAASSLQSGVPS | | 170) | ID NO: | ID | 362) | NO: |
| | GRFTISRDNSKNT | RFSGSGSGTDFT | | | 360) | NO: | | 363) |
| | LYLQMNSLRAEDT | LTISSLQPEDFA | | | | 1417) | | |
| | AVYYCARDRPYYY | TYYCQQYKSYPV | | | | | | |
| | YMDVWGKGTTVTV | TFGQGTKVEIK | | | | | | |
| | SS (SEQ ID | (SEQ ID NO: | | | | | | |
| | NO: 591) | 1372) | | | | | | |
| MIAB155 | EVQLLESGGGLVQ | DIQMTQSPSSLS | FTFSDFW | SYISGDS | CARDRP | RASQS | SSLQS | QQYKS |
| | PGGSLRLSCAASG | ASVGDRVTITCR | MH (SEQ | GYTNYA | YYYYMD | ISSSL | (SEQ | YPVT |
| | FTFSDFWMHWVRQ | ASQSISSSLNWY | ID NO: | (SEQ ID | VW | N | ID | (SEQ |
| | APGKGLEWISYIS | QQKPGKAPKLLI | 359) | NO: | (SEQ | (SEQ | NO: | ID |
| | GDSGYTNYADSVK | YAASSLQSGVPS | | 170) | ID NO: | ID | 362) | NO: |
| | GRFTISRDNSKNT | RFSGSGSGTDFT | | | 360) | NO: | | 363) |
| | LYLQMNSLRAEDT | LTISSLQPEDFA | | | | 1418) | | |
| | AVYYCARDRPYYY | TYYCQQYKSYPV | | | | | | |
| | YMDVWGKGTTVTV | TFGQGTKVEIK | | | | | | |
| | SS (SEQ ID | (SEQ ID NO: | | | | | | |
| | NO: 591) | 1373) | | | | | | |
| MIAB156 | EVQLLESGGGLVQ | DIQMTQSPSSLS | FTFSDFW | SYISGDS | CARDRP | RASQS | SSLQS | QQYKS |
| | PGGSLRLSCAASG | ASVGDRVTITCR | MH (SEQ | GYTNYA | YYYYMD | ISRYL | (SEQ | YPVT |
| | FTFSDFWMHWVRQ | ASQSISRYLNWY | ID NO: | (SEQ ID | VW | N | ID | (SEQ |
| | APGKGLEWISYIS | QQKPGKAPKLLI | 359) | NO: | (SEQ | (SEQ | NO: | ID |
| | GDSGYTNYADSVK | YAASSLQSGVPS | | 170) | ID NO: | ID | 362) | NO: |
| | GRFTISRDNSKNT | RFSGSGSGTDFT | | | 360) | NO: | | 363) |
| | LYLQMNSLRAEDT | LTISSLQPEDFA | | | | 1419) | | |
| | AVYYCARDRPYYY | TYYCQQYKSYPV | | | | | | |
| | YMDVWGKGTTVTV | TFGQGTKVEIK | | | | | | |
| | SS (SEQ ID | (SEQ ID NO: | | | | | | |
| | NO: 591) | 1374) | | | | | | |
| MIAB157 | EVQLLESGGGLVQ | DIQMTQSPSSLS | FTFSDFW | SYISGDS | CARDRP | RASQS | SSLQS | QQYKS |
| | PGGSLRLSCAASG | ASVGDRVTITCR | MH (SEQ | GYTNYA | YYYYMD | ISSYL | (SEQ | YPVT |
| | FTFSDFWMHWVRQ | ASQSISSYLAWY | ID NO: | (SEQ ID | VW | A | ID | (SEQ |
| | APGKGLEWISYIS | QQKPGKAPKLLI | 359) | NO: | (SEQ | (SEQ | NO: | ID |
| | GDSGYTNYADSVK | YAASSLQSGVPS | | 170) | ID NO: | ID | 362) | NO: |
| | GRFTISRDNSKNT | RFSGSGSGTDFT | | | 360) | NO: | | 363) |
| | LYLQMNSLRAEDT | LTISSLQPEDFA | | | | 1420) | | |
| | AVYYCARDRPYYY | TYYCQQYKSYPV | | | | | | |
| | YMDVWGKGTTVTV | TFGQGTKVEIK | | | | | | |
| | SS (SEQ ID | (SEQ ID NO: | | | | | | |
| | NO: 591) | 1375) | | | | | | |
| MIAB158 | EVQLLESGGGLVQ | DIQMTQSPSSLS | FTFSDFW | SYISGDS | CARDRP | RASQS | SSLQS | QQYKS |
| | PGGSLRLSCAASG | ASVGDRVTITCR | MH (SEQ | GYTNYA | YYYYMD | VSSYL | (SEQ | YPVT |
| | FTFSDFWMHWVRQ | ASQSVSSYLNWY | ID NO: | (SEQ ID | VW | N | ID | (SEQ |
| | APGKGLEWISYIS | QQKPGKAPKLLI | 359) | NO: | (SEQ | (SEQ | NO: | ID |
| | GDSGYTNYADSVK | YAASSLQSGVPS | | 170) | ID NO: | ID | 362) | NO: |
| | GRFTISRDNSKNT | RFSGSGSGTDFT | | | 360) | NO: | | 363) |
| | LYLQMNSLRAEDT | LTISSLQPEDFA | | | | 1421) | | |
| | AVYYCARDRPYYY | TYYCQQYKSYPV | | | | | | |
| | YMDVWGKGTTVTV | TFGQGTKVEIK | | | | | | |
| | SS (SEQ ID | (SEQ ID NO: | | | | | | |
| | NO: 591) | 1376) | | | | | | |
| MIAB159 | EVQLLESGGGLVQ | DIQMTQSPSSLS | FTFSDFW | SYISGES | CARDRP | RASQS | SSLQS | QQYKS |
| | PGGSLRLSCAASG | ASVGDRVTITCR | MH (SEQ | GYTNYA | YYYYMD | VSRSL | (SEQ | YPVT |
| | FTFSDFWMHWVRQ | ASQSVSRSLAWY | ID NO: | (SEQ ID | VW | A | ID | (SEQ |
| | APGKGLEWISYIS | QQKPGKAPKLLI | 359) | NO: | (SEQ | (SEQ | NO: | ID |
| | GESGYTNYADSVK | YAASSLQSGVPS | | 1422) | ID NO: | ID | 362) | NO: |
| | GRFTISRDNSKNT | RFSGSGSGTDFT | | | 360) | NO: | | 363) |
| | LYLQMNSLRAEDT | LTISSLQPEDFA | | | | 361) | | |
| | AVYYCARDRPYYY | TYYCQQYKSYPV | | | | | | |
| | YMDVWGKGTTVTV | TFGQGTKVEIK | | | | | | |
| | SS (SEQ ID | (SEQ ID NO: | | | | | | |
| | NO: 1377) | 592) | | | | | | |
| MIAB160 | EVQLLESGGGLVQ | DIQMTQSPSSLS | FTFSDFW | SYISGDS | CARDRP | RASQS | SSLQS | QQYKS |
| | PGGSLRLSCAASG | ASVGDRVTITCR | MH (SEQ | GYTQYA | YYYYMD | VSRSL | (SEQ | YPVT |
| | FTFSDFWMHWVRQ | ASQSVSRSLAWY | ID NO: | (SEQ ID | VW | A | ID | (SEQ |
| | APGKGLEWISYIS | QQKPGKAPKLLI | 359) | NO: | (SEQ | (SEQ | NO: | ID |
| | GDSGYTQYADSVK | YAASSLQSGVPS | | 1423) | ID NO: | ID | 362) | NO: |
| | GRFTISRDNSKNT | RFSGSGSGTDFT | | | 360) | NO: | | 363) |
| | LYLQMNSLRAEDT | LTISSLQPEDFA | | | | 361) | | |
| | AVYYCARDRPYYY | TYYCQQYKSYPV | | | | | | |
| | YMDVWGKGTTVTV | TFGQGTKVEIK | | | | | | |
| | SS (SEQ ID | (SEQ ID NO: | | | | | | |
| | NO: 1378) | 592) | | | | | | |
| MIAB161 | EVQLLESGGGLVQ | DIQMTQSPSSLS | FTFSDFW | SYISGDS | CARDRP | RASQS | SSLQS | QQYKS |
| | PGGSLRLSCAASG | ASVGDRVTITCR | MH (SEQ | GYTNYA | YYYYMD | VSRSL | (SEQ | YPVT |
| | FTFSDFWMHWVRQ | ASQSVSRSLAWY | ID NO: | (SEQ ID | VW | A | ID | (SEQ |
| | APGKGLEWISYIS | QQKPGKAPKLLI | 359) | NO: | (SEQ | (SEQ | NO: | ID |
| | GDSGYTNYADSVK | YAASSLQSGVPS | | 170) | ID NO: | ID | 362) | NO: |
| | GRFTISRDQSKNT | RFSGSGSGTDFT | | | 360) | NO: | | 363) |
| | LYLQMNSLRAEDT | LTISSLQPEDFA | | | | 361) | | |
| | AVYYCARDRPYYY | TYYCQQYKSYPV | | | | | | |
| | YMDVWGKGTTVTV | TFGQGTKVEIK | | | | | | |
| | SS (SEQ ID | (SEQ ID NO: | | | | | | |
| | NO: 1379) | 592) | | | | | | |
| MIAB162 | EVQLLESGGGLVQ | DIQMTQSPSSLS | FTFSDFW | SYISGDS | CARDRP | RASQS | SSLQS | QQYKS |
| | PGGSLRLSCAASG | ASVGDRVTITCR | MH (SEQ | GYTNYA | YYYYMD | VSRSL | (SEQ | YPVT |
| | FTFSDFWMHWVRQ | ASQSVSRSLGWY | ID NO: | (SEQ ID | VW | G | ID | (SEQ |
| | APGKGLEWISYIS | QQKPGKAPKLLI | 359) | NO: | (SEQ | (SEQ | NO: | ID |
| | GDSGYTNYADSVK | YAASSLQSGVPS | | 170) | ID NO: | ID | 362) | NO: |
| | GRFTISRDNSKNT | RFSGSGSGTDFT | | | 360) | NO: | | 363) |
| | LYLQMNSLRAEDT | LTISSLQPEDFA | | | | 1424) | | |
| | AVYYCARDRPYYY | TYYCQQYKSYPV | | | | | | |
| | YMDVWGKGTTVTV | TFGQGTKVEIK | | | | | | |
| | SS (SEQ ID | (SEQ ID NO: | | | | | | |
| | NO: 591) | 1380) | | | | | | |
| MIAB163 | EVQLLESGGGLVQ | DIQMTQSPSSLS | FTFSDFW | SYISGDS | CARDRP | RASQS | SSLQS | QQYKS |
| | PGGSLRLSCAASG | ASVGDRVTITCR | MH (SEQ | GYTNYA | YYYYMD | VSRSL | | YPVT |
| | FTFSDFWMHWVRQ | ASQSVSRSLDWY | ID NO: | (SEQ ID | VW | D | (SEQ | (SEQ |
| | APGKGLEWISYIS | QQKPGKAPKLLI | 359) | NO: | (SEQ | (SEQ | ID | ID |
| | GDSGYTNYADSVK | YAASSLQSGVPS | | 170) | ID NO: | ID | NO: | NO: |
| | GRFTISRDNSKNT | RFSGSGSGTDFT | | | 360) | NO: | 362) | 363) |
| | LYLQMNSLRAEDT | LTISSLQPEDFA | | | | 1425) | | |
| | AVYYCARDRPYYY | TYYCQQYKSYPV | | | | | | |
| | YMDVWGKGTTVTV | TFGQGTKVEIK | | | | | | |
| | SS (SEQ ID | (SEQ ID NO: | | | | | | |
| | NO: 591) | 1381) | | | | | | |
| MIAB164 | EVQLLESGGGLVQ | DIQMTQSPSSLS | FTFSDFW | SYISGDS | CARDRP | RASQS | SSLQS | QQYKS |
| | PGGSLRLSCAASG | ASVGDRVTITCR | MH (SEQ | GYTNYA | YYYYMD | VSRSL | (SEQ | YPVT |
| | FTFSDFWMHWVRQ | ASQSVSRSLTWY | ID NO: | (SEQ ID | VW | T | ID | (SEQ |
| | APGKGLEWISYIS | QQKPGKAPKLLI | 359) | NO: | (SEQ | (SEQ | NO: | ID |
| | GDSGYTNYADSVK | YAASSLQSGVPS | | 170) | ID NO: | ID | 362) | NO: |
| | GRFTISRDNSKNT | RFSGSGSGTDFT | | | 360) | NO: | | 363) |
| | LYLQMNSLRAEDT | LTISSLQPEDFA | | | | 1426) | | |
| | AVYYCARDRPYYY | TYYCQQYKSYPV | | | | | | |
| | YMDVWGKGTTVTV | TFGQGTKVEIK | | | | | | |
| | SS (SEQ ID | (SEQ ID NO: | | | | | | |
| | NO: 591) | 1382) | | | | | | |
| MIAB165 | EVQLLESGGGLVQ | DIQMTQSPSSLS | FTFSDFW | SYISGDS | CARDRP | RASQS | SSLQS | QQYKS |
| | PGGSLRLSCAASG | ASVGDRVTITCR | MH (SEQ | GYTNYA | YYYYMD | VSRSL | SEQ | YPVT |
| | FTFSDFWMHWVRQ | ASQSVSRSLSWY | ID NO: | (SEQ ID | VW | S | ID | (SEQ |
| | APGKGLEWISYIS | QQKPGKAPKLLI | 359) | NO: | (SEQ | (SEQ | NO: | ID |
| | GDSGYTNYADSVK | YAASSLQSGVPS | | 170) | ID NO: | ID | 362) | NO: |
| | GRFTISRDNSKNT | RFSGSGSGTDFT | | | 360) | NO: | | 363) |
| | LYLQMNSLRAEDT | LTISSLQPEDFA | | | | 1427) | | |
| | AVYYCARDRPYYY | TYYCQQYKSYPV | | | | | | |
| | YMDVWGKGTTVTV | TFGQGTKVEIK | | | | | | |
| | SS (SEQ ID | (SEQ ID NO: | | | | | | |
| | NO: 591) | 1383) | | | | | | |
| MIAB166 | EVQLLESGGGLVQ | DIQMTQSPSSLS | FTFSDFW | SYISGDS | CARDRP | RASQS | SSLQS | QQYKS |
| | PGGSLRLSCAASG | ASVGDRVTITCR | MH (SEQ | GYTNYA | YYYYMD | VSRSL | (SEQ | YPVT |
| | FTFSDFWMHWVRQ | ASQSVSRSLEWY | ID NO: | (SEQ ID | VW | E | ID | (SEQ |
| | APGKGLEWISYIS | QQKPGKAPKLLI | 359) | NO: | (SEQ | (SEQ | NO: | ID |
| | GDSGYTNYADSVK | YAASSLQSGVPS | | 170) | ID NO: | ID | 362) | NO: |
| | GRFTISRDNSKNT | RFSGSGSGTDFT | | | 360) | NO: | | 363) |
| | LYLQMNSLRAEDT | LTISSLQPEDFA | | | | 1428) | | |
| | AVYYCARDRPYYY | TYYCQQYKSYPV | | | | | | |
| | YMDVWGKGTTVTV | TFGQGTKVEIK | | | | | | |
| | SS (SEQ ID | (SEQ ID NO: | | | | | | |
| | NO: 591) | 1384) | | | | | | |
| MIAB167 | EVQLLESGGGLVQ | DIQMTQSPSSLS | FTFSDFW | SYISGDS | CARDRP | RASQS | SSLQS | QQYKS |
| | PGGSLRLSCAASG | ASVGDRVTITCR | MH (SEQ | GYTNYA | YYYYMD | VSRSL | (SEQ | YPVT |
| | FTFSDFWMHWVRQ | ASQSVSRSLKWY | ID NO: | (SEQ ID | VW | K | ID | (SEQ |
| | APGKGLEWISYIS | QQKPGKAPKLLI | 359) | NO: | (SEQ | (SEQ | NO: | ID |
| | GDSGYTNYADSVK | YAASSLQSGVPS | | 170) | ID NO: | ID | 362) | NO: |
| | GRFTISRDNSKNT | RFSGSGSGTDFT | | | 360) | NO: | | 363) |
| | LYLQMNSLRAEDT | LTISSLQPEDFA | | | | 1429) | | |
| | AVYYCARDRPYYY | TYYCQQYKSYPV | | | | | | |
| | YMDVWGKGTTVTV | TFGQGTKVEIK | | | | | | |
| | SS (SEQ ID | (SEQ ID NQ | | | | | | |
| | NO: 591) | 1385) | | | | | | |
| MIAB168 | EVQLLESGGGLVQ | DIQMTQSPSSLS | FTFSDFW | SYISGDS | CARDRP | RASQS | SSLQS | QQYKS |
| | PGGSLRLSCAASG | ASVGDRVTITCR | MH (SEQ | GYTNYA | YYYYMD | VSRSL | (SEQ | YPVT |
| | FTFSDFWMHWVRQ | ASQSVSRSLLWY | ID NO: | (SEQ ID | VW | L | ID | (SEQ |
| | APGKGLEWISYIS | QQKPGKAPKLLI | 359) | NO: | (SEQ | (SEQ | NO: | ID |
| | GDSGYTNYADSVK | YAASSLQSGVPS | | 170) | ID NO: | ID | 362) | NO: |
| | GRFTISRDNSKNT | RFSGSGSGTDFT | | | 360) | NO: | | 363) |
| | LYLQMNSLRAEDT | LTISSLQPEDFA | | | | 1430) | | |
| | AVYYCARDRPYYY | TYYCQQYKSYPV | | | | | | |
| | YMDVWGKGTTVTV | TFGQGTKVEIK | | | | | | |
| | SS (SEQ ID | (SEQ ID NO: | | | | | | |
| | NO: 591) | 1386) | | | | | | |
| MIAB169 | EVQLLESGGGLVQ | DIQMTQSPSSLS | FTFSDFW | SYISGDS | CARDRP | RASQS | SSLQS | QQYKS |
| | PGGSLRLSCAASG | ASVGDRVTITCR | MH (SEQ | GYTNYA | YYYIMD | VSRSL | (SEQ | YPVT |
| | FTFSDFWMHWVRQ | ASQSVSRSLAWY | ID NO: | (SEQ ID | VW | A | ID | (SEQ |
| | APGKGLEWISYIS | QQKPGKAPKLLI | 359) | NO: | (SEQ | (SEQ | NO: | ID |
| | GDSGYTNYADSVK | YAASSLQSGVPS | | 170) | ID NO: | ID | 362) | NO: |
| | GRFTISRDNSKNT | RFSGSGSGTDFT | | | 1431) | NO: | | 363) |
| | LYLQMNSLRAEDT | LTISSLQPEDFA | | | | 361) | | |
| | AVYYCARDRPYYY | TYYCQQYKSYPV | | | | | | |
| | IMDVWGKGTTVTV | TFGQGTKVEIK | | | | | | |
| | SS (SEQ ID | (SEQ ID NO: | | | | | | |
| | NO: 1387) | 592) | | | | | | |
| MIAB170 | EVQLLESGGGLVQ | DIQMTQSPSSLS | FTFSDFW | SYISGDS | CARDRP | RASQS | SSLQS | QQYKS |
| | PGGSLRLSCAASG | ASVGDRVTITCR | MH (SEQ | GYTNYA | YYYWMD | VSRSL | (SEQ | YPVT |
| | FTFSDFWMHWVRQ | ASQSVSRSLAWY | ID NO: | (SEQ ID | VW | A | ID | (SEQ |
| | APGKGLEWISYIS | QQKPGKAPKLLI | 359) | NO: | (SEQ | (SEQ | NO: | ID |
| | GDSGYTNYADSVK | YAASSLQSGVPS | | 170) | ID NO: | ID | 362) | NO: |
| | GRFTISRDNSKNT | RFSGSGSGTDFT | | | 1432) | NO: | | 363) |
| | LYLQMNSLRAEDT | LTISSLQPEDFA | | | | 361) | | |
| | AVYYCARDRPYYY | TYYCQQYKSYPV | | | | | | |
| | WMDVWGKGTTVTV | TFGQGTKVEIK | | | | | | |
| | SS (SEQ ID | (SEQ ID NO: | | | | | | |
| | NO: 1388) | 592) | | | | | | |
| MIAB171 | EVQLLESGGGLVQ | DIQMTQSPSSLS | FTFSDFW | SYISGDS | CARDRP | RASQS | SSLQS | QQYKS |
| | PGGSLRLSCAASG | ASVGDRVTITCR | MH (SEQ | GYTNYA | SYYYMD | VSRSL | (SEQ | YPVT |
| | FTFSDFWMHWVRQ | ASQSVSRSLAWY | ID NO: | (SEQ ID | VW | A | ID | (SEQ |
| | APGKGLEWISYIS | QQKPGKAPKLLI | 359) | NO: | (SEQ | (SEQ | NO: | ID |
| | GDSGYTNYADSVK | YAASSLQSGVPS | | 170) | ID NO: | ID | 362) | NO: |
| | GRFTISRDNSKNT | RFSGSGSGTDFT | | | 1433) | NO: | | 363) |
| | LYLQMNSLRAEDT | LTISSLQPEDFA | | | | 361) | | |
| | AVYYCARDRPSYY | TYYCQQYKSYPV | | | | | | |
| | YMDVWGKGTTVTV | TFGQGTKVEIK | | | | | | |
| | SS (SEQ ID | (SEQ ID NO: | | | | | | |
| | NO: 1389) | 592) | | | | | | |
| MIAB172 | EVQLLESGGGLVQ | DIQMTQSPSSLS | FTFSDFW | SYISGDS | CARDRP | RASQS | SSLQS | QQYKS |
| | PGGSLRLSCAASG | ASVGDRVTITCR | MH (SEQ | GYTNYA | TYYYMD | VSRSL | (SEQ | YPVT |
| | FTFSDFWMHWVRQ | ASQSVSRSLAWY | ID NO: | (SEQ ID | VW | A | ID | (SEQ |
| | APGKGLEWISYIS | QQKPGKAPKLLI | 359) | NO: | (SEQ | (SEQ | NO: | ID |
| | GDSGYTNYADSVK | YAASSLQSGVPS | | 170) | ID NO: | ID | 362) | NO: |
| | GRFTISRDNSKNT | RFSGSGSGTDFT | | | 1434) | NO: | | 363) |
| | LYLQMNSLRAEDT | LTISSLQPEDFA | | | | 361) | | |
| | AVYYCARDRPTYY | TYYCQQYKSYPV | | | | | | |
| | YMDVWGKGTTVTV | TFGQGTKVEIK | | | | | | |
| | SS (SEQ ID | (SEQ ID NO: | | | | | | |
| | NO: 1390) | 592) | | | | | | |
| MIAB173 | EVQLLESGGGLVQ | DIQMTQSPSSLS | FTFSDFW | SYISGDS | CARDRP | RASQS | SSLQS | QQYKS |
| | PGGSLRLSCAASG | ASVGDRVTITCR | MH (SEQ | GYTNYA | YYYYMD | VSRSL | (SEQ | YPVT |
| | FTFSDFWMHWVRQ | ASQSVSRSLAWY | ID NO: | (SEQ ID | VW | A | ID | (SEQ |
| | APGKGLEWISYIS | QQKPGKAPKLLI | 359) | NO: | (SEQ | (SEQ | NO: | ID |
| | GDSGYTNYADSVK | YAASSLQSGVPS | | 170) | ID NO: | ID | 362) | NO: |
| | GRFTISRDNSKNT | RFSGSGSGTDFT | | | 360) | NO: | | 363) |
| | LYLQMNSLRAEDT | LTISSLQPEDFA | | | | 361) | | |
| | AVYYCARDRPYYY | TYYCQQYKSYPV | | | | | | |
| | YMDVWGKGTTVTV | TFGQGTKVEIK | | | | | | |
| | SS (SEQ ID | (SEQ ID NO: | | | | | | |
| | NO: 591) | 592) | | | | | | |
| MIAB174 | EVQLLESGGGLVQ | DIQMTQSPSSLS | FTFSDYW | SYISGDS | CARDRP | RASQS | SSLQS | QQYKS |
| | PGGSLRLSCAASG | ASVGDRVTITCR | MH (SEQ | GYTNYA | YYYYMD | VSRSL | (SEQ | YPVT |
| | FTFSDYWMHWVRQ | ASQSVSRSLAWY | ID NO: | (SEQ ID | VW | A | ID | (SEQ |
| | APGKGLEWISYIS | QQKPGKAPKLLI | 1435) | NO: | (SEQ | (SEQ | NO: | ID |
| | GDSGYTNYADSVK | YAASSLQSGVPS | | 170) | ID NO: | ID | 362) | NO: |
| | GRFTISRDNSKNT | RFSGSGSGTDFT | | | 360) | NO: | | 363) |
| | LYLQMNSLRAEDT | LTISSLQPEDFA | | | | 361) | | |
| | AVYYCARDRPYYY | TYYCQQYKSYPV | | | | | | |
| | YMDVWGKGTTVTV | TFGQGTKVEIK | | | | | | |
| | SS (SEQ ID | (SEQ ID NO: | | | | | | |
| | NO: 1391) | 592) | | | | | | |
| MIAB175 | EVQLLESGGGLVQ | DIQMTQSPSSLS | FTFSSYW | SYISGDS | CARDRP | RASQS | SSLQS | QQYKS |
| | PGGSLRLSCAASG | ASVGDRVTITCR | MH (SEQ | GYTNYA | YYYYMD | VSRSL | (SEQ | YPVT |
| | FTFSSYWMHWVRQ | ASQSVSRSLAWY | ID NO: | (SEQ ID | VW | A | ID | (SEQ |
| | APGKGLEWISYIS | QQKPGKAPKLLI | 83) | NO: | (SEQ | (SEQ | NO: | ID |
| | GDSGYTNYADSVK | YAASSLQSGVPS | | 170) | ID NO: | ID | 362) | NO: |
| | GRFTISRDNSKNT | RFSGSGSGTDFT | | | 360) | NO: | | 363) |
| | LYLQMNSLRAEDT | LTISSLQPEDFA | | | | 361) | | |
| | AVYYCARDRPYYY | TYYCQQYKSYPV | | | | | | |
| | YMDVWGKGTTVTV | TFGQGTKVEIK | | | | | | |
| | SS (SEQ ID | (SEQ ID NO: | | | | | | |
| | NO: 1392) | 592) | | | | | | |
| MIAB176 | EVQLLESGGGLVQ | DIQMTQSPSSLS | FTFSDFW | SAISGSS | CARDRP | RASQS | SSLQS | QQYKS |
| | PGGSLRLSCAASG | ASVGDRVTITCR | MH (SEQ | GSTYYA | YYYYMD | VSRSL | (SEQ | YPVT |
| | FTFSDFWMHWVRQ | ASQSVSRSLAWY | ID NO: | (SEQ ID | VW | A | ID | (SEQ |
| | APGKGLEWISAIS | QQKPGKAPKLLI | 359) | NO: | (SEQ | (SEQ | NO: | ID |
| | GSSGSTYYADSVK | YAASSLQSGVPS | | 1436) | ID NO: | ID | 362) | NO: |
| | GRFTISRDNSKNT | RFSGSGSGTDFT | | | 360) | NO: | | 363) |
| | LYLQMNSLRAEDT | LTISSLQPEDFA | | | | 361) | | |
| | AVYYCARDRPYYY | TYYCQQYKSYPV | | | | | | |
| | YMDVWGKGTTVTV | TFGQGTKVEIK | | | | | | |
| | SS (SEQ ID | (SEQ ID NO: | | | | | | |
| | NO: 1393) | 592) | | | | | | |
| MIAB177 | EVQLLESGGGLVQ | DIQMTQSPSSLS | FTFSDFW | SAISGSG | CARDRP | RASQS | SSLQS | QQYKS |
| | PGGSLRLSCAASG | ASVGDRVTITCR | MH (SEQ | GSTYYA | YYYYMD | VSRSL | (SEQ | YPVT |
| | FTFSDFWMHWVRQ | ASQSVSRSLAWY | ID NO: | (SEQ ID | VW | A | ID | (SEQ |
| | APGKGLEWVSAIS | QQKPGKAPKLLI | 359) | NO: | (SEQ | (SEQ | NO: | ID |
| | GSGGSTYYADSVK | YAASSLQSGVPS | | 103) | ID NO: | ID | 362) | NO: |
| | GRETISRDNSKNT | RFSGSGSGTDFT | | | 360) | NO: | | 363) |
| | LYLQMNSLRAEDT | LTISSLQPEDFA | | | | 361) | | |
| | AVYYCARDRPYYY | TYYCQQYKSYPV | | | | | | |
| | YMDVWGKGTTVTV | TFGQGTKVEIK | | | | | | |
| | SS (SEQ ID | (SEQ ID NO: | | | | | | |
| | NO: 1357) | 592) | | | | | | |
| MIAB178 | EVQLLESGGGLVQ | DIQMTQSPSSLS | FTFSSYW | SAISGSS | CARDRP | RASQS | SSLQS | QQYKS |
| | PGGSLRLSCAASG | ASVGDRVTITCR | MH (SEQ | GSTYYA | YYYYMD | VSRSL | (SEQ | YPVT |
| | FTFSSYWMHWVRQ | ASQSVSRSLAWY | ID NO: | (SEQ ID | VW | A | ID | (SEQ |
| | APGKGLEWISAIS | QQKPGKAPKLLI | 83) | NO: | (SEQ | (SEQ | NO: | ID |
| | GSSGSTYYADSVK | YAASSLQSGVPS | | 1436) | ID NO: | ID | 362) | NO: |
| | GRFTISRDNSKNT | RFSGSGSGTDFT | | | 360) | NO: | | 363) |
| | LYLQMNSLRAEDT | LTISSLQPEDFA | | | | 361) | | |
| | AVYYCARDRPYYY | TYYCQQYKSYPV | | | | | | |
| | YMDVWGKGTTVTV | TFGQGTKVEIK | | | | | | |
| | SS (SEQ ID | (SEQ ID NO: | | | | | | |
| | NO: 1394) | 592) | | | | | | |
| MIAB179 | EVQLLESGGGLVQ | DIQMTQSPSSLS | FTFSSYW | SAISGSG | CARDRP | RASQS | SSLQS | QQYKS |
| | PGGSLRLSCAASG | ASVGDRVTITCR | MH (SEQ | GSTYYA | YYYYMD | ISRYL | (SEQ | YPVT |
| | FTFSSYWMHWVRQ | ASQSISRYLAWY | ID NO: | (SEQ ID | VW | A | ID | (SEQ |
| | APGKGLEWVSAIS | QQKPGKAPKLLI | 83) | NO: | (SEQ | (SEQ | NO: | ID |
| | GSGGSTYYADSVK | YAASSLQSGVPS | | 103) | ID NO: | ID | 362) | NO: |
| | GRFTISRDNSKNT | RFSGSGSGTDFT | | | 360) | NO: | | 363) |
| | LYLQMNSLRAEDT | LTISSLQPEDFA | | | | 1413) | | |
| | AVYYCARDRPYYY | TYYCQQYKSYPV | | | | | | |
| | YMDVWGKGTTVTV | TFGQGTKVEIK | | | | | | |
| | SS (SEQ ID | (SEQ ID NO: | | | | | | |
| | NO: 1395) | 1368) | | | | | | |
| MIAB180 | EVQLLESGGGLVQ | DIQMTQSPSSLS | FTFSSYW | SAISGSG | CARDRP | RASQS | SSLQS | QQYKS |
| | PGGSLRLSCAASG | ASVGDRVTITCR | MH (SEQ | GSTYYA | YYYYMD | VSRSL | (SEQ | YPVT |
| | FTFSSYWMHWVRQ | ASQSVSRSLAWY | ID NO: | (SEQ ID | VW | A | ID | (SEQ |
| | APGKGLEWVSAIS | QQKPGKAPKLLI | 83) | NO: | (SEQ | (SEQ | NO: | ID |
| | GSGGSTYYADSVK | YAASSLQSGVPS | | 103) | ID NO: | ID | 362) | NO: |
| | GRFTISRDNSKNT | RFSGSGSGTDFT | | | 360) | NO: | | 363) |
| | LYLQMNSLRAEDT | LTISSLQPEDFA | | | | 361) | | |
| | AVYYCARDRPYYY | TYYCQQYKSYPV | | | | | | |
| | YMDVWGKGTTVTV | TFGQGTKVEIK | | | | | | |
| | SS (SEQ ID | (SEQ ID NO: | | | | | | |
| | NO: 1395) | 592) | | | | | | |
| MIAB181 | EVQLLESGGGLVQ | DIQMTQSPSSLS | FTFSSYW | SAISGSG | CARDRP | RASQS | SSLQS | QQYKS |
| | PGGSLRLSCAASG | ASVGDRVTITCR | MH (SEQ | GSTYYA | YYYYMD | ISRYL | (SEQ | YPVT |
| | FTFSSYWMHWVRQ | ASQSISRYLAWY | ID NO: | (SEQ ID | VW | A | ID | (SEQ |
| | APGKGLEWVSAIS | QQKPGKAPKLLI | 83) | NO: | (SEQ | (SEQ | NO: | ID |
| | GSGGSTYYADSVK | YAASSLQSGVPS | | 103) | ID NO: | ID | 362) | NO: |
| | GRFTISRDNSKNT | RFSGSGSGTDFT | | | 360) | NO: | | 363) |
| | LYLQMNSLRAEDT | LTISSLQPEDFA | | | | 1413) | | |
| | AVYYCARDRPYYY | TYYCQQYKSYPV | | | | | | |
| | YMDVWGKGTTVTV | TFGQGTKVEIK | | | | | | |
| | SS (SEQ ID | (SEQ ID NO: | | | | | | |
| | NO: 1395) | 1368) | | | | | | |
| MIAB182 | EVQLLESGGGLVQ | DIQMTQSPSSLS | FTFSSYW | SAISGSG | CARDRP | RASQS | SSLQS | QQYKS |
| | PGGSLRLSCAASG | ASVGDRVTITCR | MH (SEQ | GSTYYA | YYYYMD | ISRSL | (SEQ | YPVT |
| | FTFSSYWMHWVRQ | ASQSISRSLAWY | ID NO: | (SEQ ID | VW | A | ID | (SEQ |
| | APGKGLEWVSAIS | QQKPGKAPKLLI | 83) | NO: | (SEQ | (SEQ | NO: | ID |
| | GSGGSTYYADSVK | YAASSLQSGVPS | | 103) | ID NO: | ID | 362) | NO: |
| | GRFTISRDNSKNT | RFSGSGSGTDFT | | | 360) | NO: | | 363) |
| | LYLQMNSLRAEDT | LTISSLQPEDFA | | | | 1408) | | |
| | AVYYCARDRPYYY | TYYCQQYKSYPV | | | | | | |
| | YMDVWGKGTTVTV | TFGQGTKVEIK | | | | | | |
| | SS (SEQ ID | (SEQ ID NO: | | | | | | |
| | NO: 1395) | 1363) | | | | | | |
| MIAB183 | EVQLLESGGGLVQ | DIQMTQSPSSLS | FTFSSYW | SAISGSG | CARDRP | RASQS | SSLQS | QQYKS |
| | PGGSLRLSCAASG | ASVGDRVTITCR | MH SEQ | GSTYYA | YYYYMD | VSSSL | (SEQ | YPVT |
| | FTFSSYWMHWVRQ | ASQSVSSSLAWY | ID NO: | (SEQ ID | VW | A | ID | (SEQ |
| | APGKGLEWVSAIS | QQKPGKAPKLLI | 83) | NO: | (SEQ | (SEQ | NO: | ID |
| | GSGGSTYYADSVK | YAASSLQSGVPS | | 103) | ID NO: | ID | 362) | NO: |
| | GRFTISRDNSKNT | RFSGSGSGTDFT | | | 360) | NO: | | 363) |
| | LYLQMNSLRAEDT | LTISSLQPEDFA | | | | 1409) | | |
| | AVYYCARDRPYYY | TYYCQQYKSYPV | | | | | | |
| | YMDVWGKGTTVTV | TFGQGTKVEIK | | | | | | |
| | SS (SEQ ID | (SEQ ID NO: | | | | | | |
| | NO: 1395) | 1364) | | | | | | |
| MIAB184 | EVQLLESGGGLVQ | DIQMTQSPSSLS | FTFSSYW | SAISGSG | CARDRP | RASQS | SSLQS | QQYKS |
| | PGGSLRLSCAASG | ASVGDRVTITCR | MH (SEQ | GSTYYA | YYYYMD | ISSSL | (SEQ | YPVT |
| | FTFSSYWMHWVRQ | ASQSISSSLAWY | ID NO: | (SEQ ID | VW | A | ID | (SEQ |
| | APGKGLEWVSAIS | QQKPGKAPKLLI | 83) | NO: | (SEQ | (SEQ | NO: | ID |
| | GSGGSTYYADSVK | YAASSLQSGVPS | | 103) | ID NO: | ID | 362) | NO: |
| | GRFTISRDNSKNT | RFSGSGSGTDFT | | | 360) | NO: | | 363) |
| | LYLQMNSLRAEDT | LTISSLQPEDFA | | | | 1412) | | |
| | AVYYCARDRPYYY | TYYCQQYKSYPV | | | | | | |
| | YMDVWGKGTTVTV | TFGQGTKVEIK | | | | | | |
| | SS (SEQ ID | (SEQ ID NO: | | | | | | |
| | NO: 1395) | 1367) | | | | | | |
| MIAB185 | EVQLLESGGGLVQ | DIQMTQSPSSLS | FTFSSYW | SYISGDS | CARDRP | RASQS | SSLQS | QQYKS |
| | PGGSLRLSCAASG | ASVGDRVTITCR | MH (SEQ | GYTNYA | YYYIMD | ISRSL | (SEQ | YPVT |
| | FTFSSYWMHWVRQ | ASQSISRSLAWY | ID NO: | (SEQ ID | VW | A | ID | (SEQ |
| | APGKGLEWISYIS | QQKPGKAPKLLI | 83) | NO: | (SEQ | (SEQ | NO: | ID |
| | GDSGYTNYADSVK | YAASSLQSGVPS | | 170) | ID NO: | ID | 362) | NO: |
| | GRFTISRDNSKNT | RFSGSGSGTDFT | | | 1431) | NO: | | 363) |
| | LYLQMNSLRAEDT | LTISSLQPEDFA | | | | 1408) | | |
| | AVYYCARDRPYYY | TYYCQQYKSYPV | | | | | | |
| | IMDVWGKGTTVTV | TFGQGTKVEIK | | | | | | |
| | SS (SEQ ID | (SEQ ID NO: | | | | | | |
| | NO: 1396) | 1363) | | | | | | |
| MIAB186 | EVQLLESGGGLVQ | DIQMTQSPSSLS | FTFSSYW | SYISGDS | CARDRP | RASQS | SSLQS | QQYKS |
| | PGGSLRLSCAASG | ASVGDRVTITCR | MH (SEQ | GYTNYA | YYYIMD | VSSSL | (SEQ | YPVT |
| | FTFSSYWMHWVRQ | ASQSVSSSLAWY | ID NO: | (SEQ ID | VW | A | ID | (SEQ |
| | APGKGLEWISYIS | QQKPGKAPKLLI | 83) | NO: | (SEQ | (SEQ | NO: | ID |
| | GDSGYTNYADSVK | YAASSLQSGVPS | | 170) | ID NO: | ID | 362) | NO: |
| | GRFTISRDNSKNT | RFSGSGSGTDFT | | | 1431) | NO: | | 363) |
| | LYLQMNSLRAEDT | LTISSLQPEDFA | | | | 1409) | | |
| | AVYYCARDRPYYY | TYYCQQYKSYPV | | | | | | |
| | IMDVWGKGTTVTV | TFGQGTKVEIK | | | | | | |
| | SS (SEQ ID | (SEQ ID NO: | | | | | | |
| | NO: 1396) | 1364) | | | | | | |
| MIAB187 | EVQLLESGGGLVQ | DIQMTQSPSSLS | FTFSSYW | SYISGDS | CARDRP | RASQS | SSLQS | QQYKS |
| | PGGSLRLSCAASG | ASVGDRVTITCR | MH (SEQ | GYTNYA | YYYIMD | ISSSL | (SEQ | YPVT |
| | FTFSSYWMHWVRQ | ASQSISSSLAWY | ID NO: | (SEQ ID | VW | A | ID | (SEQ |
| | APGKGLEWISYIS | QQKPGKAPKLLI | 83) | NO: | (SEQ | (SEQ | NO: | ID |
| | GDSGYTNYADSVK | YAASSLQSGVPS | | 170) | ID NO: | ID | 362) | NO: |
| | GRFTISRDNSKNT | RFSGSGSGTDFT | | | 1431) | NO: | | 363) |
| | LYLQMNSLRAEDT | LTISSLQPEDFA | | | | 1412) | | |
| | AVYYCARDRPYYY | TYYCQQYKSYPV | | | | | | |
| | IMDVWGKGTTVTV | TFGQGTKVEIK | | | | | | |
| | SS (SEQ ID | (SEQ ID NO: | | | | | | |
| | NO: 1396) | 1367) | | | | | | |
| MIAB188 | EVQLLESGGGLVQ | DIQMTQSPSSLS | FTFSDFW | SAISGSG | CARDRP | RASQS | SSLQS | QQYKS |
| | PGGSLRLSCAASG | ASVGDRVTITCR | MH (SEQ | GSTYYA | YYYIMD | ISRSL | (SEQ | YPVT |
| | FTFSDFWMHWVRQ | ASQSISRSLAWY | ID NO: | (SEQ ID | VW | A | ID | (SEQ |
| | APGKGLEWVSAIS | QQKPGKAPKLLI | 359) | NO: | (SEQ | (SEQ | NO: | ID |
| | GSGGSTYYADSVK | YAASSLQSGVPS | | 103) | ID NO: | ID | 362) | NO: |
| | GRFTISRDNSKNT | RFSGSGSGTDFT | | | 1431) | NO: | | 363) |
| | LYLQMNSLRAEDT | LTISSLQPEDFA | | | | 1408) | | |
| | AVYYCARDRPYYY | TYYCQQYKSYPV | | | | | | |
| | IMDVWGKGTTVTV | TFGQGTKVEIK | | | | | | |
| | SS (SEQ ID | (SEQ ID NO: | | | | | | |
| | NO: 1397) | 1363) | | | | | | |
| MIAB189 | EVQLLESGGGLVQ | DIQMTQSPSSLS | FTFSDFW | SAISGSG | CARDRP | RASQS | SSLQS | QQYKS |
| | PGGSLRLSCAASG | ASVGDRVTITCR | MH (SEQ | GSTYYA | YYYIMD | VSSSL | (SEQ | YPVT |
| | FTFSDFWMHWVRQ | ASQSVSSSLAWY | ID NO: | (SEQ ID | VW | A | ID | (SEQ |
| | APGKGLEWVSAIS | QQKPGKAPKLLI | 359) | NO: | (SEQ | (SEQ | NO: | ID |
| | GSGGSTYYADSVK | YAASSLQSGVPS | | 103) | ID NO: | ID | 362) | NO: |
| | GRFTISRDNSKNT | RFSGSGSGTDFT | | | 1431) | NO: | | 363) |
| | LYLQMNSLRAEDT | LTISSLQPEDFA | | | | 1409) | | |
| | AVYYCARDRPYYY | TYYCQQYKSYPV | | | | | | |
| | IMDVWGKGTTVTV | TFGQGTKVEIK | | | | | | |
| | SS (SEQ ID | (SEQ ID NO: | | | | | | |
| | NO: 1397) | 1364) | | | | | | |
| MIAB190 | EVQLLESGGGLVQ | DIQMTQSPSSLS | FTFSDFW | SAISGSG | CARDRP | RASQS | SSLQS | QQYKS |
| | PGGSLRLSCAASG | ASVGDRVTITCR | MH (SEQ | GSTYYA | YYYIMD | ISSSL | (SEQ | YPVT |
| | FTFSDFWMHWVRQ | ASQSISSSLAWY | ID NO: | (SEQ ID | VW | A | ID | (SEQ |
| | APGKGLEWVSAIS | QQKPGKAPKLLI | 359) | NO: | (SEQ | (SEQ | NO: | ID |
| | GSGGSTYYADSVK | YAASSLQSGVPS | | 103) | ID NO: | ID | 362) | NO: |
| | GRFTISRDNSKNT | RFSGSGSGTDFT | | | 1431) | NO: | | 363) |
| | LYLQMNSLRAEDT | LTISSLQPEDFA | | | | 1412) | | |
| | AVYYCARDRPYYY | TYYCQQYKSYPV | | | | | | |
| | IMDVWGKGTTVTV | TFGQGTKVEIK | | | | | | |
| | SS (SEQ ID | (SEQ ID NO: | | | | | | |
| | NO: 1397) | 1367) | | | | | | |
| MIAB191 | EVQLLESGGGLVQ | DIQMTQSPSSLS | FTFSSYW | SAISGSG | CARDRP | RASQS | SSLQS | QQYKS |
| | PGGSLRLSCAASG | ASVGDRVTITCR | MH (SEQ | GSTYYA | YYYIMD | ISRSL | (SEQ | YPVT |
| | FTFSSYWMHWVRQ | ASQSISRSLAWY | ID NO: | (SEQ ID | VW | A | ID | (SEQ |
| | APGKGLEWVSAIS | QQKPGKAPKLLI | 83) | NO: | (SEQ | (SEQ | NO: | ID |
| | GSGGSTYYADSVK | YAASSLQSGVPS | | 103) | ID NO: | ID | 362) | NO: |
| | GRFTISRDNSKNT | RFSGSGSGTDFT | | | 1431) | NO: | | 363) |
| | LYLQMNSLRAEDT | LTISSLQPEDFA | | | | 1408) | | |
| | AVYYCARDRPYYY | TYYCQQYKSYPV | | | | | | |
| | IMDVWGKGTTVTV | TFGQGTKVEIK | | | | | | |
| | SS (SEQ ID | (SEQ ID NO: | | | | | | |
| | NO: 1398) | 1363) | | | | | | |
| MIAB192 | EVQLLESGGGLVQ | DIQMTQSPSSLS | FTFSSYW | SAISGSG | CARDRP | RASQS | SSLQS | QQYKS |
| | PGGSLRLSCAASG | ASVGDRVTITCR | MH (SEQ | GSTYYA | YYYIMD | VSSSL | (SEQ | YPVT |
| | FTFSSYWMHWVRQ | ASQSVSSSLAWY | ID NO: | (SEQ ID | VW | A | ID | (SEQ |
| | APGKGLEWVSAIS | QQKPGKAPKLLI | 83) | NO: | (SEQ | (SEQ | NO: | ID |
| | GSGGSTYYADSVK | YAASSLQSGVPS | | 103) | ID NO: | ID | 362) | NO: |
| | GRFTISRDNSKNT | RFSGSGSGTDFT | | | 1431) | NO: | | 363) |
| | LYLQMNSLRAEDT | LTISSLQPEDFA | | | | 1409) | | |
| | AVYYCARDRPYYY | TYYCQQYKSYPV | | | | | | |
| | IMDVWGKGTTVTV | TFGQGTKVEIK | | | | | | |
| | SS (SEQ ID | (SEQ ID NO: | | | | | | |
| | NO: 1398) | 1364) | | | | | | |
| MIAB193 | EVQLLESGGGLVQ | DIQMTQSPSSLS | FTFSSYW | SAISGSG | CARDRP | RASQS | SSLQS | QQYKS |
| | PGGSLRLSCAASG | ASVGDRVTITCR | MH (SEQ | GSTYYA | YYYIMD | ISSSL | (SEQ | YPVT |
| | FTFSSYWMHWVRQ | ASQSISSSLAWY | ID NO: | (SEQ ID | VW | A | ID | (SEQ |
| | APGKGLEWVSAIS | QQKPGKAPKLLI | 83) | NO: | (SEQ | (SEQ | NO: | ID |
| | GSGGSTYYADSVK | YAASSLQSGVPS | | 103) | ID NO: | ID | 362) | NO: |
| | GRFTISRDNSKNT | RFSGSGSGTDFT | | | 1431) | NO: | | 363) |
| | LYLQMNSLRAEDT | LTISSLQPEDFA | | | | 1412) | | |
| | AVYYCARDRPYYY | TYYCQQYKSYPV | | | | | | |
| | IMDVWGKGTTVTV | TFGQGTKVEIK | | | | | | |
| | SS (SEQ ID | (SEQ ID NO: | | | | | | |
| | NO: 1398) | 1367) | | | | | | |
| MIAB194 | EVQLLESGGGLVQ | DIQMTQSPSSLS | FTFSDFW | SYISGDS | CARDRP | RASQS | SSLQS | QQYKS |
| | PGGSLRLSCAASG | ASVGDRVTITCR | MH (SEQ | GYTNYA | YYYIMD | ISRSL | (SEQ | YPVT |
| | FTFSDFWMHWVRQ | ASQSISRSLAWY | ID NO: | (SEQ ID | VW | A | ID | (SEQ |
| | APGKGLEWISYIS | QQKPGKAPKLLI | 359) | NO: | (SEQ | (SEQ | NO: | ID |
| | GDSGYTNYADSVK | YAASSLQSGVPS | | 170) | ID NO: | ID | 362) | NO: |
| | GRFTISRDNSKNT | RFSGSGSGTDFT | | | 1431) | NO: | | 363) |
| | LYLQMNSLRAEDT | LTISSLQPEDFA | | | | 1408) | | |
| | AVYYCARDRPYYY | TYYCQQYKSYPV | | | | | | |
| | IMDVWGKGTTVTV | TFGQGTKVEIK | | | | | | |
| | SS (SEQ ID | (SEQ ID NO: | | | | | | |
| | NO: 1387) | 1363) | | | | | | |
| MIAB195 | EVQLLESGGGLVQ | DIQMTQSPSSLS | FTFSDFW | SYISGDS | CARDRP | RASQS | SSLQS | QQYKS |
| | PGGSLRLSCAASG | ASVGDRVTITCR | MH (SEQ | GYTNYA | YYYIMD | VSSSL | (SEQ | YPVT |
| | FTFSDFWMHWVRQ | ASQSVSSSLAWY | ID NO: | (SEQ ID | VW | A | ID | (SEQ |
| | APGKGLEWISYIS | QQKPGKAPKLLI | 359) | NO: | (SEQ | (SEQ | NO: | ID |
| | GDSGYTNYADSVK | YAASSLQSGVPS | | 170) | ID NO: | ID | 362) | NO: |
| | GRFTISRDNSKNT | RFSGSGSGTDFT | | | 1431) | NO: | | 363) |
| | LYLQMNSLRAEDT | LTISSLQPEDFA | | | | 1409) | | |
| | AVYYCARDRPYYY | TYYCQQYKSYPV | | | | | | |
| | IMDVWGKGTTVTV | TFGQGTKVEIK | | | | | | |
| | SS (SEQ ID | (SEQ ID NO: | | | | | | |
| | NO: 1387) | 1364) | | | | | | |
| MIAB196 | EVQLLESGGGLVQ | DIQMTQSPSSLS | FTFSDFW | SYISGDS | CARDRP | RASQS | SSLQS | QQYKS |
| | PGGSLRLSCAASG | ASVGDRVTITCR | MH (SEQ | GYTNYA | YYYIMD | ISSSL | (SEQ | YPVT |
| | FTFSDFWMHWVRQ | ASQSISSSLAWY | ID NO: | (SEQ ID | VW | A | ID | (SEQ |
| | APGKGLEWISYIS | QQKPGKAPKLLI | 359) | NO: | (SEQ | (SEQ | NO: | ID |
| | GDSGYTNYADSVK | YAASSLQSGVPS | | 170) | ID NO: | ID | 362) | NO: |
| | GRFTISRDNSKNT | RFSGSGSGTDFT | | | 1431) | NO: | | 363) |
| | LYLQMNSLRAEDT | LTISSLQPEDFA | | | | 1412) | | |
| | AVYYCARDRPYYY | TYYCQQYKSYPV | | | | | | |
| | IMDVWGKGTTVTV | TFGQGTKVEIK | | | | | | |
| | SS (SEQ ID | (SEQ ID NO: | | | | | | |
| | NO: 1387) | 1367) | | | | | | |
| MIAB197 | EVQLLESGGGLVQ | DIQMTQSPSSLS | FTFSDFW | SYISGDS | CARDRP | RASQS | SSLQS | QQYKS |
| | PGGSLRLSCAASG | ASVGDRVTITCR | MH (SEQ | GYTNYA | YYYIMD | ISRSL | (SEQ | YPVT |
| | FTFSDFWMHWVRQ | ASQSISRSLAWY | ID NO: | (SEQ ID | VW | A | ID | (SEQ |
| | APGKGLEWISYIS | QQKPGKAPKLLI | 359) | NO: | (SEQ | (SEQ | NO: | ID |
| | GDSGYTNYADSVK | YAASSLQSGVPS | | 170) | ID NO: | ID | 362) | NO: |
| | GRFTISRDNSKNT | RFSGSGSGTDFT | | | 1431) | NO: | | 363) |
| | LYLQMNSLRAEDT | LTISSLQPEDFA | | | | 1408) | | |
| | AVYYCARDRPYYY | TYYCQQYKSYPV | | | | | | |
| | IMDVWGKGTTVTV | TFGQGTKVEIK | | | | | | |
| | SS (SEQ ID | (SEQ ID NO: | | | | | | |
| | NO: 1387) | 1363) | | | | | | |
| MIAB198 | EVQLLESGGGLVQ | DIQMTQSPSSLS | FTFSDFW | SYISGDS | CARDRP | RASQS | SSLQS | QQYKS |
| | PGGSLRLSCAASG | ASVGDRVTITCR | MH (SEQ | GYTNYA | YYYIMD | VSRSL | (SEQ | YPVT |
| | FTFSDFWMHWVRQ | ASQSVSRSLAWY | ID NO: | (SEQ ID | VW | A | ID | (SEQ |
| | APGKGLEWISYIS | QQKPGKAPKLLI | 359) | NO: | (SEQ | (SEQ | NO: | ID |
| | GDSGYTNYADSVK | YAASSLQSGVPS | | 170) | ID NO: | ID | 362) | NO: |
| | GRFTISRDNSKNT | RFSGSGSGTDFT | | | 1431) | NO: | | 363) |
| | LYLQMNSLRAEDT | LTISSLQPEDFA | | | | 361) | | |
| | AVYYCARDRPYYY | TYYCQQYKSYPV | | | | | | |
| | IMDVWGKGTTVTV | TFGQGTKVEIK | | | | | | |
| | SS (SEQ ID | (SEQ ID NO: | | | | | | |
| | NO: 1387) | 592) | | | | | | |
| MIAB205 | EVQLLESGGGLVQ | EIVMTQSPATLS | FTFDDYA | ASITSSS | CARERV | RASQS | RASTR | CQQYH |
| | PGGSLRLSCAASG | VSPGERATLSCR | MH (SEQ | AFIDYA | DWFSYF | VYSNL | AT | IWPPT |
| | FTFDDYAMHWVRQ | ASQSVYSNLAWY | ID NO: | (SEQ ID | DLW | A | (SEQ | F |
| | APGKGLEWVASIT | QQKPGQAPRLLI | 135) | NO: | (SEQ | (SEQ | ID | (SEQ |
| | SSSAFIDYADSVK | YRASTRATGIPA | | 381) | ID NO: | ID | NO: | ID |
| | GRFTISRDNSKNT | RFSGSGSGTEFT | | | 909) | NO: | 913) | NO: |
| | LYLQMNSLRAEDT | LTISSLQSEDFA | | | | 912) | | 914) |
| | AVYYCARERVDWF | VYYCQQYHIWPP | | | | | | |
| | SYFDLWGQGTLVT | TFGQGTKVEIK | | | | | | |
| | VSS (SEQ ID | (SEQ ID NO: | | | | | | |
| | NO: 1533) | 690) | | | | | | |
| MIAB206 | EVQLLESGGGLVQ | EIVMTQSPATLS | FTFDDYA | ASITSSS | CARERV | RASQS | RASTR | CQQYH |
| | PGGSLRLSCAASG | VSPGERATLSCR | MH (SEQ | AFIDYA | DWYSYF | VYSNL | AT | IWPPT |
| | FTFDDYAMHWVRQ | ASQSVYSNLAWY | ID NO: | (SEQ ID | DLW | A | (SEQ | F |
| | APGKGLEWVASIT | QQKPGQAPRLLI | 135) | NO: | (SEQ | (SEQ | ID | (SEQ |
| | SSSAFIDYADSVK | YRASTRATGIPA | | 381) | ID NO: | ID | NO: | ID |
| | GRFTISRDNSKNT | RFSGSGSGTEFT | | | 1225) | NO: | 913) | NO: |
| | LYLQMNSLRAEDT | LTISSLQSEDFA | | | | 912) | | 914) |
| | AVYYCARERVDWY | VYYCQQYHIWPP | | | | | | |
| | SYFDLWGQGTLVT | TFGQGTKVEIK | | | | | | |
| | VSS (SEQ ID | (SEQ ID NO: | | | | | | |
| | NO: 1534) | 690) | | | | | | |
| MIAB207 | EVQLLESGGGLVQ | EIVMTQSPATLS | FTFDDYA | ASITSSS | CARERV | RASQS | RASTR | CQQYH |
| | PGGSLRLSCAASG | VSPGERATLSCR | MH (SEQ | AFIDYA | DWNSYF | VYSNL | AT | IWPPT |
| | FTFDDYAMHWVRQ | ASQSVYSNLVWY | ID NO: | (SEQ ID | DLW | V | (SEQ | F |
| | APGKGLEWVASIT | QQKPGQAPRLLI | 135) | NO: | (SEQ | (SEQ | ID | (SEQ |
| | SSSAFIDYADSVK | YRASTRATGIPA | | 381) | ID NO: | ID | NO: | ID |
| | GRFTISRDNSKNT | RFSGSGSGTEFT | | | 382) | NO: | 913) | NO: |
| | LYLQMNSLRAEDT | LTISSLQSEDFA | | | | 1540) | | 914) |
| | AVYYCARERVDWN | VYYCQQYHIWPP | | | | | | |
| | SYFDLWGQGTLVT | TFGQGTKVEIK | | | | | | |
| | VSS (SEQ ID | (SEQ ID NO: | | | | | | |
| | NO: 664 | 1535) | | | | | | |
| MIAB208 | EVQLLESGGGLVQ | EIVMTQSPATLS | FTFDDYA | ASITSSS | CARERV | RASQS | DASTR | CQQYH |
| | PGGSLRLSCAASG | VSPGERATLSCR | MH (SEQ | AFIDYA | DWNSYF | VYSNL | AT | IWPPT |
| | FTFDDYAMHWVRQ | ASQSVYSNLAWY | ID NO: | (SEQ ID | DLW | A | (SEQ | F |
| | APGKGLEWVASIT | QQKPGQAPRLLI | 135) | NO: | (SEQ | (SEQ | ID | (SEQ |
| | SSSAFIDYADSVK | YDASTRATGIPA | | 381) | ID NO: | ID | NO: | ID |
| | GRFTISRDNSKNT | RFSGSGSGTEFT | | | 382) | NO: | 904) | NO: |
| | LYLQMNSLRAEDT | LTISSLQSEDFA | | | | 912) | | 914) |
| | AVYYCARERVDWN | VYYCQQYHIWPP | | | | | | |
| | SYFDLWGQGTLVT | TFGQGTKVEIK | | | | | | |
| | VSS (SEQ ID | (SEQ ID NO: | | | | | | |
| | NO: 664) | 1536) | | | | | | |
| MIAB209 | EVQLLESGGGLVQ | EIVMTQSPATLS | FTFDDYA | ASITSSS | CARERV | RASQS | RASTR | CQQYH |
| | PGGSLRLSCAASG | VSPGERATLSCR | MH (SEQ | AFIDYA | DWNSYF | VYSNY | AT | IWPPT |
| | FTFDDYAMHWVRQ | ASQSVYSNYLAW | ID NO: | (SEQ ID | DLW | LA | (SEQ | F |
| | APGKGLEWVASIT | YQQKPGQAPRLL | 135) | NO: | (SEQ | (SEQ | ID | (SEQ |
| | SSSAFIDYADSVK | IYRASTRATGIP | | 381) | ID NO: | ID | NO: | ID |
| | GRFTISRDNSKNT | ARFSGSGSGTEF | | | 382) | NO: | 913) | NO: |
| | LYLQMNSLRAEDT | TLTISSLQSEDF | | | | 1541) | | 914) |
| | AVYYCARERVDWN | AVYYCQQYSHWP | | | | | | |
| | SYFDLWGQGTLVT | PTFGQGTKVEIK | | | | | | |
| | VSS (SEQ ID | (SEQ ID NO: | | | | | | |
| | NO: 664) | 1537) | | | | | | |

[0481] In some embodiments, the MAdCAM antibody comprises one or more sequences, or a combination thereof, of the sequences presented in Table 9.

[0482] In some embodiments, the antibody is linked to another antibody or therapeutic. In some embodiments, the MAdCAM antibody is linked to a PD-1 antibody or an IL-2 mutein as provided herein or that is incorporated by reference.

[0483] In some embodiments, the variable light chain MAdCAM antibody comprises a mutation selected from the group comprising V29I; R31S; S32Y; A34N; Y91S; K92Y; Y94T; and V99R.

[0484] In some embodiments, the variable heavy chain MAdCAM antibody comprises a mutation selected from the group comprising D31S, F32Y, I48V, Y50A, D54S, Y57S, N59Y, Y103G, V29I, R31S; D31S, F32Y, I48V, Y50A, D54S, Y57S, N59Y, V29I, R31S; D31S, F32Y, I48V, Y50A, D54S, Y57S, N59Y, Y103G, V29I; D31S, F32Y, I48V, Y50A, D54S, Y57S, N59Y, V29I; D31S, F32Y, Y50A, D54S, S55G, Y57S, N59Y, Y103G, V29I, R31S; D31S, F32Y, Y50A, D54S, S55G, Y57S, N59Y, V29I, R31S; D31S, F32Y, Y50A, D54S, S55G, Y57S, N59Y, Y103G, V29I; D31S, F32Y, Y50A, D54S, S55G, Y57S, N59Y, V29I; D31S, F32Y, I48V, Y50A, D54S, S55G, Y57S, N59Y, Y103G, V29I, R31S; D31S, F32Y, I48V, Y50A, D54S, S55G, Y57S, N59Y, V29I, R31S; D31S, F32Y, I48V, Y50A, D54S, S55G, Y57S, N59Y, Y103G, V29I; D31S, F32Y, I48V, Y50A, D54S, S55G, Y57S, N59Y, V29I; D31S, F32Y, I48V, D54S, S55G, Y103G, V29I, R31S; D31S, F32Y, I48V, Y50A, D54S, S55G, Y57S, N59Y, Y105D, V29I, R31S; D31S, F32Y, I48V, D54S, S55G, Y105D, V29I, R31S; D31S, F32Y, I48V, Y50A, D54S, S55G, Y57S, N59Y, Y103G, V29I, R31S; D31S, F32Y, I48V, D54S, S55G, Y105D, V29I, R31S; D31S; F32Y; W33A; H35S; I48V; Y50A; D54S; 555G; Y57S; N59Y; D60A; D60Q; N72A; N72Q; N82A; N82G; and N82Q.

[0485] In some embodiments, the MAdCAM antibody comprises one or more sequences as shown in Table 6 or Table 9. In some embodiments, the MAdCAM antibody comprises a combination of one or more sequence as shown in Table 6, or Table 9. In some embodiments, the MAdCAM antibody is in a scFv format as illustrated in Table 6. In some embodiments, the antibody comprises a CDR1 from any one of clones 1-66 of Table 6, a CDR2 from any one of clones 1-84, and a CDR3 from any one of clones 1-66 of Table 6. In some embodiments, the antibody comprises a LCDR1 from any one of clones 1-66 of Table 6, a LCDR2 from any one of clones 1-66 of Table 6, and a LCDR3 from any one of clones 1-66 of Table 6. In some embodiments, the MAdCAM antibody is in a Fab format as illustrated in Table 9. In some embodiments, the antibody comprises a HCDR1 from any one of clones MIAB1-198 or MIAB205-209 of Table 9, a HCDR2 from any one of clones MIAB1-198 or MIAB205-209 of Table 9, and a HCDR3 from any one of clones MIAB1-198 or MIAB205-209 of Table 9. In some embodiments, the antibody comprises a LCDR1 from any one of clones MIAB1-198 or MIAB205-209 of Table 9, a LCDR2 from any one of clones MIAB1-198 or MIAB205-209 of Table 9, and a LCDR3 from any one of clones MIAB1-198 or MIAB205-209 of Table 9. In some embodiments, the amino acid residues of the CDRs shown above contain mutations. In some embodiments, the CDRs contain 1, 2, 3, 4, 5, 6, 7, 8, 9, or 10 substitutions or mutations. In some embodiments, the substitution is a conservative substitution.

[0486] In some embodiments, the MAdCAM antibody has a VH region selected from any one of clones 1-84 of Table 7 and a VL region selected from any one of clones 1-84 as set forth in of Table 7. In some embodiments, the antibody comprises a CDR1 from any one of clones 1-84 of Table 7, a CDR2 from any one of clones 1-84, and a CDR3 from any one of clones 1-84 of Table 7. In some embodiments, the antibody comprises a LCDR1 from any one of clones 1-84 of Table 7, a LCDR2 from any one of clones 1-84 of Table 7, and a LCDR3 from any one of clones 1-84 of Table 7. In some embodiments, the MAdCAM antibody has a VH region selected from any one of clones MIAB1-198 or MIAB205-209 of Table 9 and a VL region selected from any one of clones MIAB1-198 or MIAB205-209 as set forth in of Table 9. In some embodiments, the antibody comprises a CDR1 from any one of clones MIAB1-198 or MIAB205-209 of Table 9, a CDR2 from any one of clones MIAB1-198 or MIAB205-209, and a CDR3 from any one of clones MIAB1-198 or MIAB205-209 of Table 9. In some embodiments, the antibody comprises a LCDR1 from any one of clones MIAB1-198 or MIAB205-209 of Table 9, a LCDR2 from any one of clones MIAB1-198 or MIAB205-209 of Table 9, and a LCDR3 from any one of clones MIAB1-198 or MIAB205-209 of Table 9.

[0487] In some embodiments, the amino acid residues of the CDRs shown above contain mutations. In some embodiments, the CDRs contain 1, 2, 3, 4, 5, 6, 7, 8, 9, or 10 substitutions or mutations. In some embodiments, the substitution is a conservative substitution.

[0488] In some embodiments, the molecule comprises an antibody that binds to MAdCAM. In some embodiments, the antibody comprises (i) a heavy chain variable region comprising heavy chain CDR1, CDR2, and CDR3 sequences, wherein the heavy chain CDR1 sequence has the amino acid sequence of any of the CDR1 sequences set forth in Table 6, Table 7, or Table 9; the heavy chain CDR2 has the amino acid sequence of any of the CDR2 sequences set forth in Table 6, Table 7, or Table 9, and the heavy chain CDR3 has the amino acid sequence of any of the CDR3 sequences set forth in Table 6, Table 7, or Table 9; or variants of any of the foregoing; and (ii) a light chain variable region comprising light chain CDR1, CDR2, and CDR3 sequences, wherein the light chain CDR1 sequence has the amino acid sequence of any of the LCDR1 sequences set forth in Table 6, Table 7, or Table 9; the light chain LCDR2 has the amino acid sequence of any of the LCDR2 sequences set forth in Table 6, Table 7, or Table 9, and the light chain CDR3 has the amino acid sequence of any of the LCDR3 sequences set forth in Table 6, Table 7, or Table 9, or variants of any of the foregoing.

[0489] In some embodiments, the antibody comprises a heavy chain variable region comprising heavy chain CDR1, CDR2, and CDR3 sequences, wherein the heavy chain CDR1, CDR2, and CDR3 sequences have the amino acid sequence as set forth in Antibody 6 of Table 6 or Antibody 6 of Table 7, or variants of any of the foregoing; and (ii) a light chain variable region comprising light chain CDR1, CDR2, and CDR3 sequences, wherein the light chain CDR1, CDR2, and CDR3 sequences have the amino acid sequence as set forth sequence as set forth in Antibody 6 of Table 6 or Antibody 6 of Table 7, or variants of any of the foregoing.

[0490] In some embodiments, the antibody comprises a heavy chain variable region comprising heavy chain CDR1, CDR2, and CDR3 sequences, wherein the heavy chain CDR1, CDR2, and CDR3 sequences have the amino acid sequence as set forth in Antibody 59 of Table 6 or Antibody 75 of Table 7, or variants of any of the foregoing; and (ii) a light chain variable region comprising light chain CDR1, CDR2, and CDR3 sequences, wherein the light chain CDR1, CDR2, and CDR3 sequences have the amino acid sequence as set forth sequence as set forth in Antibody 59 of Table 6 or Antibody 75 of Table 7, or variants of any of the foregoing.

[0491] In some embodiments, the antibody comprises a heavy chain variable region comprising heavy chain CDR1, CDR2, and CDR3 sequences, wherein the heavy chain CDR1, CDR2, and CDR3 sequences have the amino acid sequence as set forth in Antibody 63 of Table 6 or Antibody 79 of Table 7, or variants of any of the foregoing; and (ii) a light chain variable region comprising light chain CDR1, CDR2, and CDR3 sequences, wherein the light chain CDR1, CDR2, and CDR3 sequences have the amino acid sequence as set forth sequence as set forth in Antibody 63 of or Antibody 79 of Table 7, or variants of any of the foregoing.

[0492] In some embodiments, the antibody comprises a heavy chain variable region comprising heavy chain CDR1, CDR2, and CDR3 sequences, wherein the heavy chain CDR1, CDR2, and CDR3 sequences have the amino acid sequence as set forth in MIAB197 of Table 9, or variants of any of the foregoing; and (ii) a light chain variable region comprising light chain CDR1, CDR2, and CDR3 sequences, wherein the light chain CDR1, CDR2, and CDR3 sequences have the amino acid sequence as set forth sequence as set forth in MIAB197 of Table 9, or variants of any of the foregoing.

[0493] In some embodiments, the antibody comprises a heavy chain variable region comprising heavy chain CDR1, CDR2, and CDR3 sequences, wherein the heavy chain CDR1, CDR2, and CDR3 sequences have the amino acid sequence as set forth in MIAB126 of Table 9, or variants of any of the foregoing; and (ii) a light chain variable region comprising light chain CDR1, CDR2, and CDR3 sequences, wherein the light chain CDR1, CDR2, and CDR3 sequences have the amino acid sequence as set forth sequence as set forth in MIAB126 of Table 9, or variants of any of the foregoing.

[0494] These are non-limiting illustrative examples and the antibodies can have the CDRs as set forth in the tables provided herein and are explicitly referenced without writing out the previous paragraphs for each CDR set.

[0495] In some embodiments, the MAdCAM antibody comprises a VH and VL(VK) chain as provided herein, such as those listed in the Table 7, MAdCAM Antibody CDR Table 1, and Table 9. In some embodiments, the VH peptide comprises a sequence of SEQ ID NO: 414, 591, 599, 880, or 1387. In some embodiments, the VL chain comprises a sequence of 415, 592, 600, 663, or 1363. In some embodiments, the antibody comprises a VH of SEQ ID NO: 414 and a VL of SEQ ID NO: 415. In some embodiments, the antibody comprises a VH of SEQ ID NO: 591 and a VL of SEQ ID NO: 592. In some embodiments, the antibody comprises a VH of SEQ ID NO: 599 and a VL of SEQ ID NO: 600. In some embodiments, the antibody comprises a VH of SEQ ID NO: 880 and a VL of SEQ ID NO: 663. In some embodiments, the antibody comprises a VH of SEQ ID NO: 1387 and a VL of SEQ ID NO: 1363. The VH and VL can also be in a scFv format as illustrated in the Table 6, Table 11, Table 12, and Table 14. The VH and VL can also be in a Fab format as illustrated in the Table 9.

[0496] In some embodiments, a therapeutic is provided comprising one or more of the following polypeptides:

| SEQ ID NO: | Sequence |
|---|---|
| 620 | EVQLLESGGGLVQPGGSLRLSCAASGFTFNNYAFHWVRQAPGKGLEWVSRINSYGTSTTYADSVKGRF |
| | TISRDNSKNTLYLQMNSLRAEDTAVYYCAREGPVAGYWYFDLWGQGTLVTVSSASTKGPSVFPLAPSS |
| | KSTSGGTAALGCLVKDYFPEPVTVSWNSGALTSGVHTFPAVLQSSGLYSLSSVVTVPSSSLGTQTYIC |
| | NVNHKPSNTKVDKKVEPKSCDKTHTCPPCPAPEAAGAPSVFLFPPKPKDTLMISRTPEVTCVVVDVSH |
| | EDPEVKFNWYVDGVEVHNAKTKPREEQYNSTYRVVSVLTVLHQDWLNGKEYKCKVSNKALPAPIEKTI |
| | SKAKGQPREPQVYTLPPSREEMTKNQVSLTCLVKGFYPSDIAVEWESNGQPENNYKTTPPVLDSDGSF |
| | FLYSKLTVDKSRWQQGNVFSCSVMHEALHNHYTQKSLSLSPGGGGGSAPTSSSTKKTQLQLEHLLLDL |
| | QMILNGINNYKNPKLTRMLTFKFYMPKKATELKHLQCLEEELKPLEEALNLAPSKNFHLRPRDLISDI |
| | NVIVLELKGSETTFMCEYADETATIVEFINRWITFSQSIISTLT |
| 621 | DIQMTQSPSSLSASVGDRVTITCRASQIIGTNLAWYQQKPGKAPKLLIYGASSLQSGVPSRFSGSGSG |
| | TDFTLTISSLQPEDFATYYCQQSYRLPFTFGQGTKVEIKRRTVAAPSVFIFPPSDEQLKSGTASVVCL |
| | LNNFYPREAKVQWKVDNALQSGNSQESVTEQDSKDSTYSLSSTLTLSKADYEKHKVYACEVTHQGLSS |
| | PVTKSFNRGEC |
| 622 | EVQLLESGGGLVQPGGSLRLSCAASGFTFSDFWMHWVRQAPGKGLEWISYISGDSGYTNYADSVKGRF |
| | TISRDNSKNTLYLQMNSLRAEDTAVYYCARDRPYYYYMDVWGKGTTVTVSSASTKGPSVFPLAPSSKS |
| | TSGGTAALGCLVKDYFPEPVTVSWNSGALTSGVHTFPAVLQSSGLYSLSSVVTVPSSSLGTQTYICNV |
| | NHKPSNTKVDKKVEPKSCDKTHTCPPCPAPEAAGAPSVFLFPPKPKDTLMISRTPEVTCVVVDVSHED |
| | PEVKFNWYVDGVEVHNAKTKPREEQYNSTYRVVSVLTVLHQDWLNGKEYKCKVSNKALPAPIEKTISK |
| | AKGQPREPQVYTLPPSREEMTKNQVSLTCLVKGFYPSDIAVEWESNGQPENNYKTTPPVLDSDGSFFL |
| | YSKLTVDKSRWQQGNVFSCSVMHEALHNHYTQKSLSLSPGGGGGSAPTSSSTKKTQLQLEHLLLDLQM |
| | ILNGINNYKNPKLTRMLTFKFYMPKKATELKHLQCLEEELKPLEEALNLAPSKNFHLRPRDLISDINV |
| | IVLELKGSETTFMCEYADETATIVEFINRWITFSQSIISTLT |
| 623 | DIQMTQSPSSLSASVGDRVTITCRASQSVSRSLAWYQQKPGKAPKLLIYAASSLQSGVPSRFSGSGSG |
| | TDFTLTISSLQPEDFATYYCQQYKSYPVTFGQGTKVEIKRTVAAPSVFIFPPSDEQLKSGTASVVCLL |
| | NNFYPREAKVQWKVDNALQSGNSQESVTEQDSKDSTYSLSSTLTLSKADYEKHKVYACEVTHQGLSSP |
| | VTKSFNRGEC |
| 624 | EVQLLESGGGLVKPGGSLRLSCAASGFTFDDYAMHWVRQAPGKGLEWVASITSSSAFIDYAASVKGRF |
| | TISRDDSKNTLYLQMNSLKTEDTAVYYCARERVDWNSYFDLWGRGTLVTVSSASTKGPSVFPLAPSSK |
| | STSGGTAALGCLVKDYFPEPVTVSWNSGALTSGVHTFPAVLQSSGLYSLSSVVTVPSSSLGTQTYICN |
| | VNHKPSNTKVDKKVEPKSCDKTHTCPPCPAPEAAGAPSVFLFPPKPKDTLMISRTPEVTCVVVDVSHE |
| | DPEVKFNWYVDGVEVHNAKTKPREEQYNSTYRVVSVLTVLHQDWLNGKEYKCKVSNKALPAPIEKTIS |
| | KAKGQPREPQVYTLPPSREEMTKNQVSLTCLVKGFYPSDIAVEWESNGQPENNYKTTPPVLDSDGSFF |
| | LYSKLTVDKSRWQQGNVFSCSVMHEALHNHYTQKSLSLSPGGGGGSAPTSSSTKKTQLQLEHLLLDLQ |
| | MILNGINNYKNPKLTRMLTFKFYMPKKATELKHLQCLEEELKPLEEALNLAPSKNFHLRPRDLISDIN |
| | VIVLELKGSETTFMCEYADETATIVEFINRWITFSQSIISTLT |
| 625 | EIVMTQSPATLSVSPGERATLSCRASQGISNSYLAWYQQKPGQAPRLLIYGASTRATGIPARFSGSGS |
| | GTEFTLTISSLQSEDFAVYYCQQYYTYPPTFGPGTKVDIKRTVAAPSVFIFPPSDEQLKSGTASVVCL |
| | LNNFYPREAKVQWKVDNALQSGNSQESVTEQDSKDSTYSLSSTLTLSKADYEKHKVYACEVTHQGLSS |
| | PVTKSFNRGEC |

[0497] In some embodiments, the polypeptide comprises one peptide of SEQ ID NO: 620, 622, or 624 and a second peptide of SEQ ID NO: 621, 623, or 625. In some embodiments, a polypeptide is provided comprising a first peptide of SEQ ID NO: 620 and a second peptide comprising a sequence of SEQ ID NO: 621. In some embodiments, a polypeptide is provided comprising a first peptide of SEQ ID NO: 620 and a second peptide comprising a sequence of SEQ ID NO: 623. In some embodiments, a polypeptide is provided comprising a first peptide of SEQ ID NO: 620 and a second peptide comprising a sequence of SEQ ID NO: 625. In some embodiments, a polypeptide is provided comprising a first peptide of SEQ ID NO: 622 and a second peptide comprising a sequence of SEQ ID NO: 621. In some embodiments, a polypeptide is provided comprising a first peptide of SEQ ID NO: 622 and a second peptide comprising a sequence of SEQ ID NO: 623. In some embodiments, a polypeptide is provided comprising a first peptide of SEQ ID NO: 622 and a second peptide comprising a sequence of SEQ ID NO: 625. In some embodiments, a polypeptide is provided comprising a first peptide of SEQ ID NO: 624 and a second peptide comprising a sequence of SEQ ID NO: 621. In some embodiments, a polypeptide is provided comprising a first peptide of SEQ ID NO: 624 and a second peptide comprising a sequence of SEQ ID NO: 623. In some embodiments, a polypeptide is provided comprising a first peptide of SEQ ID NO: 624 and a second peptide comprising a sequence of SEQ ID NO: 625.

[0498] In some embodiments, the therapeutic comprises a MAdCAM IgG wherein the IL-2 mutein is fused to the C-terminus of the IgG heavy chain, and is selected from one or more of the following sequences:

TABLE 10

| | | | Fc-IL- | | | |
|---|---|---|---|---|---|---|
| | | | 2M | | | |
| | | IgG1 Constant | Linker | | | |
| Ab | VH Seq | Domains Seq | Seq | IL-2M Seq | VL Seq | CK Seq |
| MIAB | EVQLLESG | ASTKGPSVFPLAPSSKSTSG | GGGGS | APTSSSTKKT | EIVMTQS | RTVAAPS |
| 1 | GGLVQPGG | GTAALGCLVKDYFPEPVTVS | (SEQ | QLQLEHLLLD | PATLSVS | VFIFPPS |
| | SLRLSCAA | WNSGALTSGVHTFPAVLQSS | ID NO: | LQMILNGINN | PGERATL | DEQLKSG |
| | SGFTFDDY | GLYSLSSVVTVPSSSLGTQT | 23) | YKNPKLTRML | SCRASQG | TASVVCL |
| | AMHWVRQA | YICNVNHKPSNTKVDKKVEP | | TFKFYMPKKA | ISNSYLA | LNNFYPR |
| | PGKGLEWV | KSCDKTHTCPPCPAPEAAGA | | TELKHLQCLE | WYQQKPG | EAKVQWK |
| | ASITSSSA | PSVFLFPPKPKDTLMISRTP | | EELKPLEEAL | QAPRLLI | VDNALQS |
| | FIDYADSV | EVTCVVVDVSHEDPEVKFNW | | NLAPSKNFHL | YGASTRA | GNSQESV |
| | KGRFTISR | YVDGVEVHNAKTKPREEQYN | | RPRDLISDIN | TGIPARF | TEQDSKD |
| | DNSKNTLY | STYRVVSVLTVLHQDWLNGK | | VIVLELKGSE | SGSGSGT | STYSLSS |
| | LQMNSLRA | EYKCKVSNKALPAPIEKTIS | | TTFMCEYADE | EFTLTIS | TLTLSKA |
| | EDTAVYYC | KAKGQPREPQVYTLPPSREE | | TATIVEFINR | SLQSEDF | DYEKHKV |
| | AREPVDWN | MTKNQVSLTCLVKGFYPSDI | | WITFSQSIIS | AVYYCQQ | YACEVTH |
| | SYFDLWGQ | AVEWESNGQPENNYKTTPPV | | TLT (SEQ | YYTYPPT | QGLSSPV |
| | GTLVTVSS | LDSDGSFFLYSKLTVDKSRW | | ID NO: 41) | FGQGTKV | TKSFNRG |
| | (SEQ ID | QQGNVFSCSVMHEALHNHYT | | | EIK | EC (SEQ |
| | NO: 662) | QKSLSLSPG (SEQ ID | | | (SEQ ID | ID NO: |
| | | NO: 44) | | | NO: | 45) |
| | | | | | 663) | |
| MIAB | EVQLLESG | ASTKGPSVFPLAPSSKSTSG | GGGGS | APTSSSTKKT | EIVMTQS | RTVAAPS |
| 2 | GGLVQPGG | GTAALGCLVKDYFPEPVTVS | (SEQ | QLQLEHLLLD | PATLSVS | VFIFPPS |
| | SLRLSCAA | WNSGALTSGVHTFPAVLQSS | ID NO: | LQMILNGINN | PGERATL | DEQLKSG |
| | SGFTFDDY | GLYSLSSVVTVPSSSLGTQT | 23) | YKNPKLTRML | SCRASQG | TASVVCL |
| | AMHWVRQA | YICNVNHKPSNTKVDKKVEP | | TFKFYMPKKA | ISNSYLA | LNNFYPR |
| | PGKGLEWV | KSCDKTHTCPPCPAPEAAGA | | TELKHLQCLE | WYQQKPG | EAKVQWK |
| | ASITSSSA | PSVFLFPPKPKDTLMISRTP | | EELKPLEEAL | QAPRLLI | VDNALQS |
| | FIDYADSV | EVTCVVVDVSHEDPEVKFNW | | NLAPSKNFHL | YGASTRA | GNSQESV |
| | KGRFTISR | YVDGVEVHNAKTKPREEQYN | | RPRDLISDIN | TGIPARF | TEQDSKD |
| | DNSKNTLY | STYRVVSVLTVLHQDWLNGK | | VIVLELKGSE | SGSGSGT | STYSLSS |
| | LQMNSLRA | EYKCKVSNKALPAPIEKTIS | | TTFMCEYADE | EFTLTIS | TLTLSKA |
| | EDTAVYYC | KAKGQPREPQVYTLPPSREE | | TATIVEFINR | SLQSEDF | DYEKHKV |
| | ARERVDWN | MTKNQVSLTCLVKGFYPSDI | | WITFSQSIIS | AVYYCQQ | YACEVTH |
| | SYFDLWGQ | AVEWESNGQPENNYKTTPPV | | TLT (SEQ | YYTYPPT | QGLSSPV |
| | GTLVTVSS | LDSDGSFFLYSKLTVDKSRW | | ID NO: 41) | FGQGTKV | TKSFNRG |
| | (SEQ ID | QQGNVFSCSVMHEALHNHYT | | | EIK | EC (SEQ |
| | NO: 664) | QKSLSLSPG (SEQ ID | | | (SEQ ID | ID NO: |
| | | NO: 44) | | | NO: | 45) |
| | | | | | 663) | |
| MIAB | EVQLLESG | ASTKGPSVFPLAPSSKSTSG | GGGGS | APTSSSTKKT | EIVMTQS | RTVAAPS |
| 3 | GGLVQPGG | GTAALGCLVKDYFPEPVTVS | (SEQ | QLQLEHLLLD | PATLSVS | VFIFPPS |
| | SLRLSCAA | WNSGALTSGVHTFPAVLQSS | ID NO: | LQMILNGINN | PGERATL | DEQLKSG |
| | SGFTFDDY | GLYSLSSVVTVPSSSLGTQT | 23) | YKNPKLTRML | SCRASQG | TASVVCL |
| | AMHWVRQA | YICNVNHKPSNTKVDKKVEP | | TFKFYMPKKA | ISNSYLA | LNNFYPR |
| | PGKGLEWV | KSCDKTHTCPPCPAPEAAGA | | TELKHLQCLE | WYQQKPG | EAKVQWK |
| | ASITSSSA | PSVFLFPPKPKDTLMISRTP | | EELKPLEEAL | QAPRLLI | VDNALQS |
| | FIDYADSV | EVTCVVVDVSHEDPEVKFNW | | NLAPSKNFHL | YGASTRA | GNSQESV |
| | KGRFTISR | YVDGVEVHNAKTKPREEQYN | | RPRDLISDIN | TGIPARF | TEQDSKD |
| | DNSKNTLY | STYRVVSVLTVLHQDWLNGK | | VIVLELKGSE | SGSGSGT | STYSLSS |
| | LQMNSLRA | EYKCKVSNKALPAPIEKTIS | | TTFMCEYADE | EFTLTIS | TLTLSKA |
| | EDTAVYYC | KAKGQPREPQVYTLPPSREE | | TATIVEFINR | SLQSEDF | DYEKHKV |
| | ARERVDWN | MTKNQVSLTCLVKGFYPSDI | | WITFSQSIIS | AVYYCQQ | YACEVTH |
| | SYFDNWGQ | AVEWESNGQPENNYKTTPPV | | TLT (SEQ | YYTYPPT | QGLSSPV |
| | GTLVTVSS | LDSDGSFFLYSKLTVDKSRW | | ID NO: 41) | FGQGTKV | TKSFNRG |
| | (SEQ ID | QQGNVFSCSVMHEALHNHYT | | | EIK | EC (SEQ |
| | NO: 665) | QKSLSLSPG (SEQ ID | | | (SEQ ID | ID NO: |
| | | NO: 44) | | | NO: | 45) |
| | | | | | 663) | |
| MIAB | EVQLLESG | ASTKGPSVFPLAPSSKSTSG | GGGGS | APTSSSTKKT | EIVMTQS | RTVAAPS |
| 4 | GGLVQPGG | GTAALGCLVKDYFPEPVTVS | (SEQ | QLQLEHLLLD | PATLSVS | VFIFPPS |
| | SLRLSCAA | WNSGALTSGVHTFPAVLQSS | ID NO: | LQMILNGINN | PGERATL | DEQLKSG |
| | SGFTLDDY | GLYSLSSVVTVPSSSLGTQT | 23) | YKNPKLTRML | SCRASQG | TASVVCL |
| | AMHWVRQA | YICNVNHKPSNTKVDKKVEP | | TFKFYMPKKA | ISNSYLA | LNNFYPR |
| | PGKGLEWV | KSCDKTHTCPPCPAPEAAGA | | TELKHLQCLE | WYQQKPG | EAKVQWK |
| | ASITSSSA | PSVFLFPPKPKDTLMISRTP | | EELKPLEEAL | QAPRLLI | VDNALQS |
| | FIDYADSV | EVTCVVVDVSHEDPEVKFNW | | NLAPSKNFHL | YGASTRA | GNSQESV |
| | KGRFTISR | YVDGVEVHNAKTKPREEQYN | | RPRDLISDIN | TGIPARF | TEQDSKD |
| | DNSKNTLY | STYRVVSVLTVLHQDWLNGK | | VIVLELKGSE | SGSGSGT | STYSLSS |
| | LQMNSLRA | EYKCKVSNKALPAPIEKTIS | | TTFMCEYADE | EFTLTIS | TLTLSKA |
| | EDTAVYYC | KAKGQPREPQVYTLPPSREE | | TATIVEFINR | SLQSEDF | DYEKHKV |
| | ARERVDWN | MTKNQVSLTCLVKGFYPSDI | | WITFSQSIIS | AVYYCQQ | YACEVTH |
| | SYFDNWGQ | AVEWESNGQPENNYKTTPPV | | TLT (SEQ | YYTYPPT | QGLSSPV |
| | GTLVTVSS | LDSDGSFFLYSKLTVDKSRW | | ID NO: 41) | FGQGTKV | TKSFNRG |
| | (SEQ ID | QQGNVFSCSVMHEALHNHYT | | | EIK | EC (SEQ |
| | NO: 666) | QKSLSLSPG (SEQ ID | | | (SEQ ID | ID NO: |
| | | NO: 44) | | | NO: | 45) |
| | | | | | 663) | |
| MIAB | EVQLLESG | ASTKGPSVFPLAPSSKSTSG | GGGGS | APTSSSTKKT | EIVMTQS | RTVAAPS |
| 5 | GGLVQPGG | GTAALGCLVKDYFPEPVTVS | (SEQ | QLQLEHLLLD | PATLSVS | VFIFPPS |
| | SLRLSCAA | WNSGALTSGVHTFPAVLQSS | ID NO: | LQMILNGINN | PGERATL | DEQLKSG |
| | SGFTFDDY | GLYSLSSVVTVPSSSLGTQT | 23) | YKNPKLTRML | SCRASQS | TASVVCL |
| | AMHWVRQA | YICNVNHKPSNTKVDKKVEP | | TFKFYMPKKA | VGSYLAW | LNNFYPR |
| | PGKGLEWV | KSCDKTHTCPPCPAPEAAGA | | TELKHLQCLE | YQQKPGQ | EAKVQWK |
| | ASITSSSA | PSVFLFPPKPKDTLMISRTP | | EELKPLEEAL | APRLLIY | VDNALQS |
| | FIDYADSV | EVTCVVVDVSHEDPEVKFNW | | NLAPSKNFHL | DASTRVT | GNSQESV |
| | KGRFTISR | YVDGVEVHNAKTKPREEQYN | | RPRDLISDIN | GIPARFS | TEQDSKD |
| | DNSKNTLY | STYRVVSVLTVLHQDWLNGK | | VIVLELKGSE | GSGSGTE | STYSLSS |
| | LQMNSLRA | EYKCKVSNKALPAPIEKTIS | | TTFMCEYADE | FTLTISS | TLTLSKA |
| | EDTAVYYC | KAKGQPREPQVYTLPPSREE | | TATIVEFINR | LQSEDFA | DYEKHKV |
| | ARERVDWN | MTKNQVSLTCLVKGFYPSDI | | WITFSQSIIS | VYYCQQY | YACEVTH |
| | SYFDLWGQ | AVEWESNGQPENNYKTTPPV | | TLT (SEQ | YTYPPTF | QGLSSPV |
| | GTLVTVSS | LDSDGSFFLYSKLTVDKSRW | | ID NO: 41) | GQGTKVE | TKSFNRG |
| | (SEQ ID | QQGNVFSCSVMHEALHNHYT | | | IK (SEQ | EC (SEQ |
| | NO: 664) | QKSLSLSPG (SEQ ID | | | ID NO: | ID NO: |
| | | NO: 44) | | | 667) | 45) |
| MIAB | EVQLLESG | ASTKGPSVFPLAPSSKSTSG | GGGGS | APTSSSTKKT | EIVMTQS | RTVAAPS |
| 6 | GGLVQPGG | GTAALGCLVKDYFPEPVTVS | (SEQ | QLQLEHLLLD | PATLSVS | VFIFPPS |
| | SLRLSCAA | WNSGALTSGVHTFPAVLQSS | ID NO: | LQMILNGINN | PGERATL | DEQLKSG |
| | SGFTFDDY | GLYSLSSVVTVPSSSLGTQT | 23) | YKNPKLTRML | SCRASQG | TASVVCL |
| | AMHWVRQA | YICNVNHKPSNTKVDKKVEP | | TFKFYMPKKA | ISNSYLA | LNNFYPR |
| | PRKGLEWV | KSCDKTHTCPPCPAPEAAGA | | TELKHLQCLE | WYQQKPG | EAKVQWK |
| | ASITSSSA | PSVFLFPPKPKDTLMISRTP | | EELKPLEEAL | QAPRLLI | VDNALQS |
| | FIDYADSV | EVTCVVVDVSHEDPEVKFNW | | NLAPSKNFHL | YGASTRA | GNSQESV |
| | KGRFTISR | YVDGVEVHNAKTKPREEQYN | | RPRDLISDIN | TGIPARF | TEQDSKD |
| | DNSKNTLY | STYRVVSVLTVLHQDWLNGK | | VIVLELKGSE | SGSGSGT | STYSLSS |
| | LQMNSLRA | EYKCKVSNKALPAPIEKTIS | | TTFMCEYADE | EFTLTIS | TLTLSKA |
| | EDTAVYYC | KAKGQPREPQVYTLPPSREE | | TATIVEFINR | SLQSEDF | DYEKHKV |
| | ARERVLWN | MTKNQVSLTCLVKGFYPSDI | | WITFSQSIIS | AVYYCQQ | YACEVTH |
| | SYFDLWGQ | AVEWESNGQPENNYKTTPPV | | TLT (SEQ | YERWPPT | QGLSSPV |
| | GTLVTVSS | LDSDGSFFLYSKLTVDKSRW | | ID NO: 41) | FGQGTKV | TKSFNRG |
| | (SEQ ID | QQGNVFSCSVMHEALHNHYT | | | EIK | EC (SEQ |
| | NO: 668) | QKSLSLSPG (SEQ ID | | | (SEQ ID | ID NO: |
| | | NO: 44) | | | NO: | 45) |
| | | | | | 669) | |
| MIAB | EVQLLESG | ASTKGPSVFPLAPSSKSTSG | GGGGS | APTSSSTKKT | EIVMTQS | RTVAAPS |
| 7 | GGLVQPGG | GTAALGCLVKDYFPEPVTVS | (SEQ | QLQLEHLLLD | PATLSVS | VFIFPPS |
| | SLRLSCAA | WNSGALTSGVHTFPAVLQSS | ID NO: | LQMILNGINN | PGERATL | DEQLKSG |
| | SGFTFDDY | GLYSLSSVVTVPSSSLGTQT | 23) | YKNPKLTRML | SCRACQG | TASVVCL |
| | AMHWVRQA | YICNVNHKPSNTKVDKKVEP | | TFKFYMPKKA | ISNSYLA | LNNFYPR |
| | PGKGLEWV | KSCDKTHTCPPCPAPEAAGA | | TELKHLQCLE | WYQQKPG | EAKVQWK |
| | ASITSSSA | PSVFLFPPKPKDTLMISRTP | | EELKPLEEAL | QAPRLLI | VDNALQS |
| | FIDYADSV | EVTCVVVDVSHEDPEVKFNW | | NLAPSKNFHL | YGASTRA | GNSQESV |
| | KGRFTISR | YVDGVEVHNAKTKPREEQYN | | RPRDLISDIN | TGIPARF | TEQDSKD |
| | DNSKNTLY | STYRVVSVLTVLHQDWLNGK | | VIVLELKGSE | SGSGSGT | STYSLSS |
| | LQMNSLRA | EYKCKVSNKALPAPIEKTIS | | TTFMCEYADE | EFTLTIS | TLTLSKA |
| | EDTAVYYC | KAKGQPREPQVYTLPPSREE | | TATIVEFINR | SLQSEDF | DYEKHKV |
| | ARERVDWN | MTKNQVSLTCLVKGFYPSDI | | WITFSQSIIS | AVYYCQQ | YACEVTH |
| | SYFDLWGQ | AVEWESNGQPENNYKTTPPV | | TLT (SEQ | YYTYPPT | QGLSSPV |
| | GTLVTVSS | LDSDGSFFLYSKLTVDKSRW | | ID NO: 41) | FGQGTKV | TKSFNRG |
| | (SEQ ID | QQGNVFSCSVMHEALHNHYT | | | EIK | EC (SEQ |
| | NO: 664) | QKSLSLSPG (SEQ ID | | | (SEQ ID | ID NO: |
| | | NO: 44) | | | NO: | 45) |
| | | | | | 670) | |
| MIAB | EVQLLESG | ASTKGPSVFPLAPSSKSTSG | GGGGS | APTSSSTKKT | EIVMTQS | RTVAAPS |
| 8 | GGLVQPGG | GTAALGCLVKDYFPEPVTVS | (SEQ | QLQLEHLLLD | PATLSVS | VFIFPPS |
| | SLRLSCAA | WNSGALTSGVHTFPAVLQSS | ID NO: | LQMILNGINN | PGERATL | DEQLKSG |
| | SGFTFDDY | GLYSLSSVVTVPSSSLGTQT | 23) | YKNPKLTRML | SCRASQS | TASVVCL |
| | AMHWVRQA | YICNVNHKPSNTKVDKKVEP | | TFKFYMPKKA | VGSYLAW | LNNFYPR |
| | PGKGLEWV | KSCDKTHTCPPCPAPEAAGA | | TELKHLQCLE | YQQKPGQ | EAKVQWK |
| | ASITSSSA | PSVFLFPPKPKDTLMISRTP | | EELKPLEEAL | APRLLIY | VDNALQS |
| | FIDYADSV | EVTCVVVDVSHEDPEVKFNW | | NLAPSKNFHL | DASARAT | GNSQESV |
| | KGRFTISR | YVDGVEVHNAKTKPREEQYN | | RPRDLISDIN | GIPARFS | TEQDSKD |
| | DNSKNTLY | STYRVVSVLTVLHQDWLNGK | | VIVLELKGSE | GSGSGTE | STYSLSS |
| | LQMNSLRA | EYKCKVSNKALPAPIEKTIS | | TTFMCEYADE | FTLTISS | TLTLSKA |
| | EDTAVYYC | KAKGQPREPQVYTLPPSREE | | TATIVEFINR | LQSEDFA | DYEKHKV |
| | ARERVDWN | MTKNQVSLTCLVKGFYPSDI | | WITFSQSIIS | VYYCQQY | YACEVTH |
| | SYFDLWGQ | AVEWESNGQPENNYKTTPPV | | TLT (SEQ | YTYPPTF | QGLSSPV |
| | GTLVTVSS | LDSDGSFFLYSKLTVDKSRW | | ID NO: 41) | GQGTKVE | TKSFNRG |
| | (SEQ ID | QQGNVFSCSVMHEALHNHYT | | | IK (SEQ | EC (SEQ |
| | NO: 664) | QKSLSLSPG (SEQ ID | | | ID NO: | ID NO: |
| | | NO: 44) | | | 671) | 45) |
| MIAB | EVQLLESG | ASTKGPSVFPLAPSSKSTSG | GGGGS | APTSSSTKKT | EIVMTQS | RTVAAPS |
| 9 | GGLVQPGG | GTAALGCLVKDYFPEPVTVS | (SEQ | QLQLEHLLLD | PATLSVS | VFIFPPS |
| | SLRLSCAA | WNSGALTSGVHTFPAVLQSS | ID NO: | LQMILNGINN | PGERATL | DEQLKSG |
| | SGFTLDDY | GLYSLSSVVTVPSSSLGTQT | 23) | YKNPKLTRML | SCRASQG | TASVVCL |
| | AMHWVRQA | YICNVNHKPSNTKVDKKVEP | | TFKFYMPKKA | ISNSYLA | LNNFYPR |
| | PGKGLEWV | KSCDKTHTCPPCPAPEAAGA | | TELKHLQCLE | WYQQKPG | EAKVQWK |
| | ASITSSSA | PSVFLFPPKPKDTLMISRTP | | EELKPLEEAL | QAPRLLI | VDNALQS |
| | FIDYADSV | EVTCVVVDVSHEDPEVKFNW | | NLAPSKNFHL | YGASTRA | GNSQESV |
| | KGRFTISR | YVDGVEVHNAKTKPREEQYN | | RPRDLISDIN | TGIPARF | TEQDSKD |
| | DNSKNTLY | STYRVVSVLTVLHQDWLNGK | | VIVLELKGSE | SGSGSGT | STYSLSS |
| | LQMNSLRA | EYKCKVSNKALPAPIEKTIS | | TTFMCEYADE | EFTLTIS | TLTLSKA |
| | EDTAVYYC | KAKGQPREPQVYTLPPSREE | | TATIVEFINR | SLQSEDF | DYEKHKV |
| | ARERVDWN | MTKNQVSLTCLVKGFYPSDI | | WITFSQSIIS | AVYYCQQ | YACEVTH |
| | SYFDLWGQ | AVEWESNGQPENNYKTTPPV | | TLT (SEQ | YYTYPPT | QGLSSPV |
| | GTLVTVSS | LDSDGSFFLYSKLTVDKSRW | | ID NO: 41) | FGQGTKV | TKSFNRG |
| | (SEQ ID | QQGNVFSCSVMHEALHNHYT | | | EIK | EC (SEQ |
| | NO: 672) | QKSLSLSPG (SEQ ID | | | (SEQ ID | ID NO: |
| | | NO: 44) | | | NO: | 45) |
| | | | | | 663) | |
| MIAB | EVQLLESG | ASTKGPSVFPLAPSSKSTSG | GGGGS | APTSSSTKKT | EIVMTQS | RTVAAPS |
| 10 | GGLVQPGG | GTAALGCLVKDYFPEPVTVS | (SEQ | QLQLEHLLLD | PATLSVS | VFIFPPS |
| | SLRLSCAA | WNSGALTSGVHTFPAVLQSS | ID NO: | LQMILNGINN | PGERATL | DEQLKSG |
| | SGFTFDDY | GLYSLSSVVTVPSSSLGTQT | 23) | YKNPKLTRML | SCRASQG | TASVVCL |
| | AMHWVRQA | YICNVNHKPSNTKVDKKVEP | | TFKFYMPKKA | ISNSYLA | LNNFYPR |
| | PGKGLEWV | KSCDKTHTCPPCPAPEAAGA | | TELKHLQCLE | WYQQKPG | EAKVQWK |
| | ASITSSSA | PSVFLFPPKPKDTLMISRTP | | EELKPLEEAL | QAPRLLI | VDNALQS |
| | FIDYADSV | EVTCVVVDVSHEDPEVKFNW | | NLAPSKNFHL | YGASTRA | GNSQESV |
| | KGRFTISR | YVDGVEVHNAKTKPREEQYN | | RPRDLISDIN | TGIPARF | TEQDSKD |
| | DNSKNTLY | STYRVVSVLTVLHQDWLNGK | | VIVLELKGSE | SGSGSGT | STYSLSS |
| | LQMNSLRA | EYKCKVSNKALPAPIEKTIS | | TTFMCEYADE | EFTLTIS | TLTLSKA |
| | EDTAVYYC | KAKGQPREPQVYTLPPSREE | | TATIVEFINR | SLQSEDF | DYEKHKV |
| | ARERVDWN | MTKNQVSLTCLVKGFYPSDI | | WITFSQSIIS | AVYYCQQ | YACEVTH |
| | SYFDLWGQ | AVEWESNGQPENNYKTTPPV | | TLT (SEQ | YYKYPPT | QGLSSPV |
| | GTLVTVSS | LDSDGSFFLYSKLTVDKSRW | | ID NO: 41) | FGQGTKV | TKSFNRG |
| | (SEQ ID | QQGNVFSCSVMHEALHNHYT | | | EIK | EC (SEQ |
| | NO: 664) | QKSLSLSPG (SEQ ID | | | (SEQ ID | ID NO: |
| | | NO: 44) | | | NO: | 45) |
| | | | | | 673) | |
| MIAB | EVQLLESG | ASTKGPSVFPLAPSSKSTSG | GGGGS | APTSSSTKKT | EIVMTQS | RTVAAPS |
| 11 | GGLVQPGG | GTAALGCLVKDYFPEPVTVS | (SEQ | QLQLEHLLLD | PATLSVS | VFIFPPS |
| | SLRLSCAA | WNSGALTSGVHTFPAVLQSS | ID NO: | LQMILNGINN | PGERATL | DEQLKSG |
| | SGFTFDDY | GLYSLSSVVTVPSSSLGTQT | 23) | YKNPKLTRML | SCRASQG | TASVVCL |
| | AMHWVRQA | YICNVNHKPSNTKVDKKVEP | | TFKFYMPKKA | ISNNYLA | LNNFYPR |
| | PGKGLEWV | KSCDKTHTCPPCPAPEAAGA | | TELKHLQCLE | WYQQKPG | EAKVQWK |
| | ASITSSSA | PSVFLFPPKPKDTLMISRTP | | EELKPLEEAL | QAPRLLI | VDNALQS |
| | FIDYADSV | EVTCVVVDVSHEDPEVKFNW | | NLAPSKNFHL | YGASTRA | GNSQESV |
| | KGRFTISR | YVDGVEVHNAKTKPREEQYN | | RPRDLISDIN | TGIPARF | TEQDSKD |
| | DNSKNTLY | STYRVVSVLTVLHQDWLNGK | | VIVLELKGSE | SGSGSGT | STYSLSS |
| | LQMNSLRA | EYKCKVSNKALPAPIEKTIS | | TTFMCEYADE | EFTLTIS | TLTLSKA |
| | EDTAVYYC | KAKGQPREPQVYTLPPSREE | | TATIVEFINR | SLQSEDF | DYEKHKV |
| | ARERVDWN | MTKNQVSLTCLVKGFYPSDI | | WITFSQSIIS | AVYYCQQ | YACEVTH |
| | SYFDLWGQ | AVEWESNGQPENNYKTTPPV | | TLT (SEQ | YYTYPPT | QGLSSPV |
| | GTLVTVSS | LDSDGSFFLYSKLTVDKSRW | | ID NO: 41) | FGQGTKV | TKSFNRG |
| | (SEQ ID | QQGNVFSCSVMHEALHNHYT | | | EIK | EC (SEQ |
| | NO: 664) | QKSLSLSPG (SEQ ID | | | (SEQ ID | ID NO: |
| | | NO: 44) | | | NO: | 45) |
| | | | | | 674) | |
| MIAB | EVQLLESG | ASTKGPSVFPLAPSSKSTSG | GGGGS | APTSSSTKKT | EIVMTQS | RTVAAPS |
| 12 | GGLVQPGG | GTAALGCLVKDYFPEPVTVS | (SEQ | QLQLEHLLLD | PATLSVS | VFIFPPS |
| | SLRLSCAA | WNSGALTSGVHTFPAVLQSS | ID NO: | LQMILNGINN | PGERATL | DEQLKSG |
| | SGFTFDDY | GLYSLSSVVTVPSSSLGTQT | 23) | YKNPKLTRML | SCRACPG | TASVVCL |
| | AMHWVRQA | YICNVNHKPSNTKVDKKVEP | | TFKFYMPKKA | ISNSYLA | LNNFYPR |
| | PGKGLEWV | KSCDKTHTCPPCPAPEAAGA | | TELKHLQCLE | WYQQKPG | EAKVQWK |
| | ASITSSSA | PSVFLFPPKPKDTLMISRTP | | EELKPLEEAL | QAPRLLI | VDNALQS |
| | FIDYADSV | EVTCVVVDVSHEDPEVKFNW | | NLAPSKNFHL | YGASTRA | GNSQESV |
| | KGRFTISR | YVDGVEVHNAKTKPREEQYN | | RPRDLISDIN | TGIPARF | TEQDSKD |
| | DNSKNTLY | STYRVVSVLTVLHQDWLNGK | | VIVLELKGSE | SGSGSGT | STYSLSS |
| | LQMNSLRA | EYKCKVSNKALPAPIEKTIS | | TTFMCEYADE | EFTLTIS | TLTLSKA |
| | EDTAVYYC | KAKGQPREPQVYTLPPSREE | | TATIVEFINR | SLQSEDF | DYEKHKV |
| | ARERVDWN | MTKNQVSLTCLVKGFYPSDI | | WITFSQSIIS | AVYYCQQ | YACEVTH |
| | SYFDLWGQ | AVEWESNGQPENNYKTTPPV | | TLT (SEQ | YYTYPPT | QGLSSPV |
| | GTLVTVSS | LDSDGSFFLYSKLTVDKSRW | | ID NO: 41) | FGQGTKV | TKSFNRG |
| | (SEQ ID | QQGNVFSCSVMHEALHNHYT | | | EIK | EC (SEQ |
| | NO: 664) | QKSLSLSPG (SEQ ID | | | (SEQ ID | ID NO: |
| | | NO: 44) | | | NO: | 45) |
| | | | | | 675) | |
| MIAB | EVQLLESG | ASTKGPSVFPLAPSSKSTSG | GGGGS | APTSSSTKKT | EIVMTQS | RTVAAPS |
| 13 | GGLVQPGG | GTAALGCLVKDYFPEPVTVS | (SEQ | QLQLEHLLLD | PATLSVS | VFIFPPS |
| | SLRLSCAA | WNSGALTSGVHTFPAVLQSS | ID NO: | LQMILNGINN | PGERATL | DEQLKSG |
| | SGFTFDDY | GLYSLSSVVTVPSSSLGTQT | 23) | YKNPKLTRML | SCRASQN | TASVVCL |
| | AMHWVRQA | YICNVNHKPSNTKVDKKVEP | | TFKFYMPKKA | VNNNLAW | LNNFYPR |
| | PGKGLEWV | KSCDKTHTCPPCPAPEAAGA | | TELKHLQCLE | YQQKPGQ | EAKVQWK |
| | ASITSSSA | PSVFLFPPKPKDTLMISRTP | | EELKPLEEAL | APRLLIY | VDNALQS |
| | FIDYADSV | EVTCVVVDVSHEDPEVKFNW | | NLAPSKNFHL | DATTRAT | GNSQESV |
| | KGRFTISR | YVDGVEVHNAKTKPREEQYN | | RPRDLISDIN | GIPARFS | TEQDSKD |
| | DNSKNTLY | STYRVVSVLTVLHQDWLNGK | | VIVLELKGSE | GSGSGTE | STYSLSS |
| | LQMNSLRA | EYKCKVSNKALPAPIEKTIS | | TTFMCEYADE | FTLTISS | TLTLSKA |
| | EDTAVYYC | KAKGQPREPQVYTLPPSREE | | TATIVEFINR | LQSEDFA | DYEKHKV |
| | ARERVLWN | MTKNQVSLTCLVKGFYPSDI | | WITFSQSIIS | VYYCQQY | YACEVTH |
| | SYFDLWGQ | AVEWESNGQPENNYKTTPPV | | TLT (SEQ | YHWPQTF | QGLSSPV |
| | GTLVTVSS | LDSDGSFFLYSKLTVDKSRW | | ID NO: 41) | GQGTKVE | TKSFNRG |
| | (SEQ ID | QQGNVFSCSVMHEALHNHYT | | | IK (SEQ | EC (SEQ |
| | NO: 676) | QKSLSLSPG (SEQ ID | | | ID NO: | ID NO: |
| | | NO: 44) | | | 677) | 45) |
| MIAB | EVQLLESG | ASTKGPSVFPLAPSSKSTSG | GGGGS | APTSSSTKKT | EIVMTQS | RTVAAPS |
| 14 | GGLVQPGG | GTAALGCLVKDYFPEPVTVS | (SEQ | QLQLEHLLLD | PATLSVS | VFIFPPS |
| | SLRLSCAA | WNSGALTSGVHTFPAVLQSS | ID NO: | LQMILNGINN | PGERATL | DEQLKSG |
| | SGFTFDDY | GLYSLSSVVTVPSSSLGTQT | 23) | YKNPKLTRML | SCRASQN | TASVVCL |
| | AMHWVRQA | YICNVNHKPSNTKVDKKVEP | | TFKFYMPKKA | VNNNLAW | LNNFYPR |
| | PGKGLEWV | KSCDKTHTCPPCPAPEAAGA | | TELKHLQCLE | YQQKPGQ | EAKVQWK |
| | ASITSSSA | PSVFLFPPKPKDTLMISRTP | | EELKPLEEAL | APRLLIY | VDNALQS |
| | FIDYADSV | EVTCVVVDVSHEDPEVKFNW | | NLAPSKNFHL | DATTRAT | GNSQESV |
| | KGRFTISR | YVDGVEVHNAKTKPREEQYN | | RPRDLISDIN | GIPARFS | TEQDSKD |
| | DNSKNTLY | STYRVVSVLTVLHQDWLNGK | | VIVLELKGSE | GSGSGTE | STYSLSS |
| | LQMNSLRA | EYKCKVSNKALPAPIEKTIS | | TTFMCEYADE | FTLTISS | TLTLSKA |
| | EDTAVYYC | KAKGQPREPQVYTLPPSREE | | TATIVEFINR | LQSEDFA | DYEKHKV |
| | ARERVDWN | MTKNQVSLTCLVKGFYPSDI | | WITFSQSIIS | VYYCQQY | YACEVTH |
| | SYFDLWGQ | AVEWESNGQPENNYKTTPPV | | TLT (SEQ | YHWPQTF | QGLSSPV |
| | GTLVTVSS | LDSDGSFFLYSKLTVDKSRW | | ID NO: 41) | GQGTKVE | TKSFNRG |
| | (SEQ ID | QQGNVFSCSVMHEALHNHYT | | | IK (SEQ | EC (SEQ |
| | NO: 664) | QKSLSLSPG (SEQ ID | | | ID NO: | ID NO: |
| | | NO: 44) | | | 677) | 45) |
| MIAB | EVQLLESG | ASTKGPSVFPLAPSSKSTSG | GGGGS | APTSSSTKKT | EIVMTQS | RTVAAPS |
| 15 | GGLVQPGG | GTAALGCLVKDYFPEPVTVS | (SEQ | QLQLEHLLLD | PATLSVS | VFIFPPS |
| | SLRLSCAA | WNSGALTSGVHTFPAVLQSS | ID NO: | LQMILNGINN | PGERATL | DEQLKSG |
| | SGFTFDDY | GLYSLSSVVTVPSSSLGTQT | 23) | YKNPKLTRML | SCRASQN | TASVVCL |
| | AMHWVRQA | YICNVNHKPSNTKVDKKVEP | | TFKFYMPKKA | VNNNYLA | LNNFYPR |
| | PGKGLEWV | KSCDKTHTCPPCPAPEAAGA | | TELKHLQCLE | WYQQKPG | EAKVQWK |
| | ASITSSSA | PSVFLFPPKPKDTLMISRTP | | EELKPLEEAL | QAPRLLI | VDNALQS |
| | FIDYADSV | EVTCVVVDVSHEDPEVKFNW | | NLAPSKNFHL | YDATTRA | GNSQESV |
| | KGRFTISR | YVDGVEVHNAKTKPREEQYN | | RPRDLISDIN | TGIPARF | TEQDSKD |
| | DNSKNTLY | STYRVVSVLTVLHQDWLNGK | | VIVLELKGSE | SGSGSGT | STYSLSS |
| | LQMNSLRA | EYKCKVSNKALPAPIEKTIS | | TTFMCEYADE | EFTLTIS | TLTLSKA |
| | EDTAVYYC | KAKGQPREPQVYTLPPSREE | | TATIVEFINR | SLQSEDF | DYEKHKV |
| | ARERVLWN | MTKNQVSLTCLVKGFYPSDI | | WITFSQSIIS | AVYYCQQ | YACEVTH |
| | SYFDLWGQ | AVEWESNGQPENNYKTTPPV | | TLT (SEQ | YYHWPQT | QGLSSPV |
| | GTLVTVSS | LDSDGSFFLYSKLTVDKSRW | | ID NO: 41) | FGQGTKV | TKSFNRG |
| | (SEQ ID | QQGNVFSCSVMHEALHNHYT | | | EIK | EC (SEQ |
| | NO: 676) | QKSLSLSPG (SEQ ID | | | (SEQ ID | ID NO: |
| | | NO: 44) | | | NO: | 45) |
| | | | | | 678) | |
| MIAB | EVQLLESG | ASTKGPSVFPLAPSSKSTSG | GGGGS | APTSSSTKKT | EIVMTQS | RTVAAPS |
| 16 | GGLVQPGG | GTAALGCLVKDYFPEPVTVS | (SEQ | QLQLEHLLLD | PATLSVS | VFIFPPS |
| | SLRLSCAA | WNSGALTSGVHTFPAVLQSS | ID NO: | LQMILNGINN | PGERATL | DEQLKSG |
| | SGFTFDDY | GLYSLSSVVTVPSSSLGTQT | 23) | YKNPKLTRML | SCRASQG | TASVVCL |
| | AMHWVRQA | YICNVNHKPSNTKVDKKVEP | | TFKFYMPKKA | VNNNLAW | LNNFYPR |
| | PGKGLEWV | KSCDKTHTCPPCPAPEAAGA | | TELKHLQCLE | YQQKPGQ | EAKVQWK |
| | ASITSSSA | PSVFLFPPKPKDTLMISRTP | | EELKPLEEAL | APRLLIY | VDNALQS |
| | FIDYADSV | EVTCVVVDVSHEDPEVKFNW | | NLAPSKNFHL | DATTRAT | GNSQESV |
| | KGRFTISR | YVDGVEVHNAKTKPREEQYN | | RPRDLISDIN | GIPARFS | TEQDSKD |
| | DNSKNTLY | STYRVVSVLTVLHQDWLNGK | | VIVLELKGSE | GSGSGTE | STYSLSS |
| | LQMNSLRA | EYKCKVSNKALPAPIEKTIS | | TTFMCEYADE | FTLTISS | TLTLSKA |
| | EDTAVYYC | KAKGQPREPQVYTLPPSREE | | TATIVEFINR | LQSEDFA | DYEKHKV |
| | ARERVLWN | MTKNQVSLTCLVKGFYPSDI | | WITFSQSIIS | VYYCQQY | YACEVTH |
| | SYFDLWGQ | AVEWESNGQPENNYKTTPPV | | TLT (SEQ | YHWPQTF | QGLSSPV |
| | GTLVTVSS | LDSDGSFFLYSKLTVDKSRW | | ID NO: 41) | GQGTKVE | TKSFNRG |
| | (SEQ ID | QQGNVFSCSVMHEALHNHYT | | | IK (SEQ | EC (SEQ |
| | NO: 676) | QKSLSLSPG (SEQ ID | | | ID NO: | ID NO: |
| | | NO: 44) | | | 679) | 45) |
| MIAB | EVQLLESG | ASTKGPSVFPLAPSSKSTSG | GGGGS | APTSSSTKKT | EIVMTQS | RTVAAPS |
| 17 | GGLVQPGG | GTAALGCLVKDYFPEPVTVS | (SEQ | QLQLEHLLLD | PATLSVS | VFIFPPS |
| | SLRLSCAA | WNSGALTSGVHTFPAVLQSS | ID NO: | LQMILNGINN | PGERATL | DEQLKSG |
| | SGFTFDDY | GLYSLSSVVTVPSSSLGTQT | 23) | YKNPKLTRML | SCRASQN | TASVVCL |
| | AMHWVRQA | YICNVNHKPSNTKVDKKVEP | | TFKFYMPKKA | INNNLAW | LNNFYPR |
| | PGKGLEWV | KSCDKTHTCPPCPAPEAAGA | | TELKHLQCLE | YQQKPGQ | EAKVQWK |
| | ASITSSSA | PSVFLFPPKPKDTLMISRTP | | EELKPLEEAL | APRLLIY | VDNALQS |
| | FIDYADSV | EVTCVVVDVSHEDPEVKFNW | | NLAPSKNFHL | DATTRAT | GNSQESV |
| | KGRFTISR | YVDGVEVHNAKTKPREEQYN | | RPRDLISDIN | GIPARFS | TEQDSKD |
| | DNSKNTLY | STYRVVSVLTVLHQDWLNGK | | VIVLELKGSE | GSGSGTE | STYSLSS |
| | LQMNSLRA | EYKCKVSNKALPAPIEKTIS | | TTFMCEYADE | FTLTISS | TLTLSKA |
| | EDTAVYYC | KAKGQPREPQVYTLPPSREE | | TATIVEFINR | LQSEDFA | DYEKHKV |
| | ARERVLWN | MTKNQVSLTCLVKGFYPSDI | | WITFSQSIIS | VYYCQQY | YACEVTH |
| | SYFDLWGQ | AVEWESNGQPENNYKTTPPV | | TLT (SEQ | YHWPQTF | QGLSSPV |
| | GTLVTVSS | LDSDGSFFLYSKLTVDKSRW | | ID NO: 41) | GQGTKVE | TKSFNRG |
| | (SEQ ID | QQGNVFSCSVMHEALHNHYT | | | IK (SEQ | EC (SEQ |
| | NO: 676) | QKSLSLSPG (SEQ ID | | | ID NO: | ID NO: |
| | | NO: 44) | | | 680) | 45) |
| MIAB | EVQLLESG | ASTKGPSVFPLAPSSKSTSG | GGGGS | APTSSSTKKT | EIVMTQS | RTVAAPS |
| 18 | GGLVQPGG | GTAALGCLVKDYFPEPVTVS | (SEQ | QLQLEHLLLD | PATLSVS | VFIFPPS |
| | SLRLSCAA | WNSGALTSGVHTFPAVLQSS | ID NO: | LQMILNGINN | PGERATL | DEQLKSG |
| | SGFTFDDY | GLYSLSSVVTVPSSSLGTQT | 23) | YKNPKLTRML | SCRASQN | TASVVCL |
| | AMHWVRQA | YICNVNHKPSNTKVDKKVEP | | TFKFYMPKKA | VSNNLAW | LNNFYPR |
| | PGKGLEWV | KSCDKTHTCPPCPAPEAAGA | | TELKHLQCLE | YQQKPGQ | EAKVQWK |
| | ASITSSSA | PSVFLFPPKPKDTLMISRTP | | EELKPLEEAL | APRLLIY | VDNALQS |
| | FIDYADSV | EVTCVVVDVSHEDPEVKFNW | | NLAPSKNFHL | DATTRAT | GNSQESV |
| | KGRFTISR | YVDGVEVHNAKTKPREEQYN | | RPRDLISDIN | GIPARFS | TEQDSKD |
| | DNSKNTLY | STYRVVSVLTVLHQDWLNGK | | VIVLELKGSE | GSGSGTE | STYSLSS |
| | LQMNSLRA | EYKCKVSNKALPAPIEKTIS | | TTFMCEYADE | FTLTISS | TLTLSKA |
| | EDTAVYYC | KAKGQPREPQVYTLPPSREE | | TATIVEFINR | LQSEDFA | DYEKHKV |
| | ARERVLWN | MTKNQVSLTCLVKGFYPSDI | | WITFSQSIIS | VYYCQQY | YACEVTH |
| | SYFDLWGQ | AVEWESNGQPENNYKTTPPV | | TLT (SEQ | YHWPQTF | QGLSSPV |
| | GTLVTVSS | LDSDGSFFLYSKLTVDKSRW | | ID NO: 41) | GQGTKVE | TKSFNRG |
| | (SEQ ID | QQGNVFSCSVMHEALHNHYT | | | IK (SEQ | EC (SEQ |
| | NO: 676) | QKSLSLSPG (SEQ ID | | | ID NO: | ID NO: |
| | | NO: 44) | | | 681) | 45) |
| MIAB | EVQLLESG | ASTKGPSVFPLAPSSKSTSG | GGGGS | APTSSSTKKT | EIVMTQS | RTVAAPS |
| 19 | GGLVQPGG | GTAALGCLVKDYFPEPVTVS | (SEQ | QLQLEHLLLD | PATLSVS | VFIFPPS |
| | SLRLSCAA | WNSGALTSGVHTFPAVLQSS | ID NO: | LQMILNGINN | PGERATL | DEQLKSG |
| | SGFTFDDY | GLYSLSSVVTVPSSSLGTQT | 23) | YKNPKLTRML | SCRASQN | TASVVCL |
| | AMHWVRQA | YICNVNHKPSNTKVDKKVEP | | TFKFYMPKKA | VNNSLAW | LNNFYPR |
| | PGKGLEWV | KSCDKTHTCPPCPAPEAAGA | | TELKHLQCLE | YQQKPGQ | EAKVQWK |
| | ASITSSSA | PSVFLFPPKPKDTLMISRTP | | EELKPLEEAL | APRLLIY | VDNALQS |
| | FIDYADSV | EVTCVVVDVSHEDPEVKFNW | | NLAPSKNFHL | DATTRAT | GNSQESV |
| | KGRFTISR | YVDGVEVHNAKTKPREEQYN | | RPRDLISDIN | GIPARFS | TEQDSKD |
| | DNSKNTLY | STYRVVSVLTVLHQDWLNGK | | VIVLELKGSE | GSGSGTE | STYSLSS |
| | LQMNSLRA | EYKCKVSNKALPAPIEKTIS | | TTFMCEYADE | FTLTISS | TLTLSKA |
| | EDTAVYYC | KAKGQPREPQVYTLPPSREE | | TATIVEFINR | LQSEDFA | DYEKHKV |
| | ARERVLWN | MTKNQVSLTCLVKGFYPSDI | | WITFSQSIIS | VYYCQQY | YACEVTH |
| | SYFDLWGQ | AVEWESNGQPENNYKTTPPV | | TLT (SEQ | YHWPQTF | QGLSSPV |
| | GTLVTVSS | LDSDGSFFLYSKLTVDKSRW | | ID NO: 41) | GQGTKVE | TKSFNRG |
| | (SEQ ID | QQGNVFSCSVMHEALHNHYT | | | IK (SEQ | EC (SEQ |
| | NO: 676) | QKSLSLSPG (SEQ ID | | | ID NO: | ID NO: |
| | | NO: 44) | | | 682) | 45) |
| MIAB | EVQLLESG | ASTKGPSVFPLAPSSKSTSG | GGGGS | APTSSSTKKT | EIVMTQS | RTVAAPS |
| 20 | GGLVQPGG | GTAALGCLVKDYFPEPVTVS | (SEQ | QLQLEHLLLD | PATLSVS | VFIFPPS |
| | SLRLSCAA | WNSGALTSGVHTFPAVLQSS | ID NO: | LQMILNGINN | PGERATL | DEQLKSG |
| | SGFTFDDY | GLYSLSSVVTVPSSSLGTQT | 23) | YKNPKLTRML | SCRASQN | TASVVCL |
| | AMHWVRQA | YICNVNHKPSNTKVDKKVEP | | TFKFYMPKKA | VNNNLAW | LNNFYPR |
| | PGKGLEWV | KSCDKTHTCPPCPAPEAAGA | | TELKHLQCLE | YQQKPGQ | EAKVQWK |
| | ASITSSSA | PSVFLFPPKPKDTLMISRTP | | EELKPLEEAL | APRLLIY | VDNALQS |
| | FIDYADSV | EVTCVVVDVSHEDPEVKFNW | | NLAPSKNFHL | GATTRAT | GNSQESV |
| | KGRFTISR | YVDGVEVHNAKTKPREEQYN | | RPRDLISDIN | GIPARFS | TEQDSKD |
| | DNSKNTLY | STYRVVSVLTVLHQDWLNGK | | VIVLELKGSE | GSGSGTE | STYSLSS |
| | LQMNSLRA | EYKCKVSNKALPAPIEKTIS | | TTFMCEYADE | FTLTISS | TLTLSKA |
| | EDTAVYYC | KAKGQPREPQVYTLPPSREE | | TATIVEFINR | LQSEDFA | DYEKHKV |
| | ARERVLWN | MTKNQVSLTCLVKGFYPSDI | | WITFSQSIIS | VYYCQQY | YACEVTH |
| | SYFDLWGQ | AVEWESNGQPENNYKTTPPV | | TLT (SEQ | YHWPQTF | QGLSSPV |
| | GTLVTVSS | LDSDGSFFLYSKLTVDKSRW | | ID NO: 41) | GQGTKVE | TKSFNRG |
| | (SEQ ID | QQGNVFSCSVMHEALHNHYT | | | IK (SEQ | EC (SEQ |
| | NO: 676) | QKSLSLSPG (SEQ ID | | | ID NO: | ID NO: |
| | | NO: 44) | | | 683) | 45) |
| MIAB | EVQLLESG | ASTKGPSVFPLAPSSKSTSG | GGGGS | APTSSSTKKT | EIVMTQS | RTVAAPS |
| 21 | GGLVQPGG | GTAALGCLVKDYFPEPVTVS | (SEQ | QLQLEHLLLD | PATLSVS | VFIFPPS |
| | SLRLSCAA | WNSGALTSGVHTFPAVLQSS | ID NO: | LQMILNGINN | PGERATL | DEQLKSG |
| | SGFTFDDY | GLYSLSSVVTVPSSSLGTQT | 23) | YKNPKLTRML | SCRASQN | TASVVCL |
| | AMHWVRQA | YICNVNHKPSNTKVDKKVEP | | TFKFYMPKKA | VNNNLAW | LNNFYPR |
| | PGKGLEWV | KSCDKTHTCPPCPAPEAAGA | | TELKHLQCLE | YQQKPGQ | EAKVQWK |
| | ASITSSSA | PSVFLFPPKPKDTLMISRTP | | EELKPLEEAL | APRLLIY | VDNALQS |
| | FIDYADSV | EVTCVVVDVSHEDPEVKFNW | | NLAPSKNFHL | DASTRAT | GNSQESV |
| | KGRFTISR | YVDGVEVHNAKTKPREEQYN | | RPRDLISDIN | GIPARFS | TEQDSKD |
| | DNSKNTLY | STYRVVSVLTVLHQDWLNGK | | VIVLELKGSE | GSGSGTE | STYSLSS |
| | LQMNSLRA | EYKCKVSNKALPAPIEKTIS | | TTFMCEYADE | FTLTISS | TLTLSKA |
| | EDTAVYYC | KAKGQPREPQVYTLPPSREE | | TATIVEFINR | LQSEDFA | DYEKHKV |
| | ARERVLWN | MTKNQVSLTCLVKGFYPSDI | | WITFSQSIIS | VYYCQQY | YACEVTH |
| | SYFDLWGQ | AVEWESNGQPENNYKTTPPV | | TLT (SEQ | YHWPQTF | QGLSSPV |
| | GTLVTVSS | LDSDGSFFLYSKLTVDKSRW | | ID NO: 41) | GQGTKVE | TKSFNRG |
| | (SEQ ID | QQGNVFSCSVMHEALHNHYT | | | IK (SEQ | EC (SEQ |
| | NO: 676) | QKSLSLSPG (SEQ ID | | | ID NO: | ID NO: |
| | | NO: 44) | | | 684) | 45) |
| MIAB | EVQLLESG | ASTKGPSVFPLAPSSKSTSG | GGGGS | APTSSSTKKT | EIVMTQS | RTVAAPS |
| 22 | GGLVQPGG | GTAALGCLVKDYFPEPVTVS | (SEQ | QLQLEHLLLD | PATLSVS | VFIFPPS |
| | SLRLSCAA | WNSGALTSGVHTFPAVLQSS | ID NO: | LQMILNGINN | PGERATL | DEQLKSG |
| | SGFTFDDY | GLYSLSSVVTVPSSSLGTQT | 23) | YKNPKLTRML | SCRASQN | TASVVCL |
| | AMHWVRQA | YICNVNHKPSNTKVDKKVEP | | TFKFYMPKKA | VNNNLAW | LNNFYPR |
| | PGKGLEWV | KSCDKTHTCPPCPAPEAAGA | | TELKHLQCLE | YQQKPGQ | EAKVQWK |
| | ASITSSSA | PSVFLFPPKPKDTLMISRTP | | EELKPLEEAL | APRLLIY | VDNALQS |
| | FIDYADSV | EVTCVVVDVSHEDPEVKFNW | | NLAPSKNFHL | DATTRAT | GNSQESV |
| | KGRFTISR | YVDGVEVHNAKTKPREEQYN | | RPRDLISDIN | GIPARFS | TEQDSKD |
| | DNSKNTLY | STYRVVSVLTVLHQDWLNGK | | VIVLELKGSE | GSGSGTE | STYSLSS |
| | LQMNSLRA | EYKCKVSNKALPAPIEKTIS | | TTFMCEYADE | FTLTISS | TLTLSKA |
| | EDTAVYYC | KAKGQPREPQVYTLPPSREE | | TATIVEFINR | LQSEDFA | DYEKHKV |
| | ARERVLWN | MTKNQVSLTCLVKGFYPSDI | | WITFSQSIIS | VYYCQQY | YACEVTH |
| | SYFDLWGQ | AVEWESNGQPENNYKTTPPV | | TLT (SEQ | YTWPQTF | QGLSSPV |
| | GTLVTVSS | LDSDGSFFLYSKLTVDKSRW | | ID NO: 41) | GQGTKVE | TKSFNRG |
| | (SEQ ID | QQGNVFSCSVMHEALHNHYT | | | IK (SEQ | EC (SEQ |
| | NO: 676) | QKSLSLSPG (SEQ ID | | | ID NO: | ID NO: |
| | | NO: 44) | | | 685) | 45) |
| MIAB | EVQLLESG | ASTKGPSVFPLAPSSKSTSG | GGGGS | APTSSSTKKT | EIVMTQS | RTVAAPS |
| 23 | GGLVQPGG | GTAALGCLVKDYFPEPVTVS | (SEQ | QLQLEHLLLD | PATLSVS | VFIFPPS |
| | SLRLSCAA | WNSGALTSGVHTFPAVLQSS | ID NO: | LQMILNGINN | PGERATL | DEQLKSG |
| | SGFTFDDY | GLYSLSSVVTVPSSSLGTQT | 23) | YKNPKLTRML | SCRASQN | TASVVCL |
| | AMHWVRQA | YICNVNHKPSNTKVDKKVEP | | TFKFYMPKKA | VNNNLAW | LNNFYPR |
| | PGKGLEWV | KSCDKTHTCPPCPAPEAAGA | | TELKHLQCLE | YQQKPGQ | EAKVQWK |
| | ASITSSSA | PSVFLFPPKPKDTLMISRTP | | EELKPLEEAL | APRLLIY | VDNALQS |
| | FIDYADSV | EVTCVVVDVSHEDPEVKFNW | | NLAPSKNFHL | DATTRAT | GNSQESV |
| | KGRFTISR | YVDGVEVHNAKTKPREEQYN | | RPRDLISDIN | GIPARFS | TEQDSKD |
| | DNSKNTLY | STYRVVSVLTVLHQDWLNGK | | VIVLELKGSE | GSGSGTE | STYSLSS |
| | LQMNSLRA | EYKCKVSNKALPAPIEKTIS | | TTFMCEYADE | FTLTISS | TLTLSKA |
| | EDTAVYYC | KAKGQPREPQVYTLPPSREE | | TATIVEFINR | LQSEDFA | DYEKHKV |
| | ARERVLWN | MTKNQVSLTCLVKGFYPSDI | | WITFSQSIIS | VYYCQQY | YACEVTH |
| | SYFDLWGQ | AVEWESNGQPENNYKTTPPV | | TLT (SEQ | YHYPQTF | QGLSSPV |
| | GTLVTVSS | LDSDGSFFLYSKLTVDKSRW | | ID NO: 41) | GQGTKVE | TKSFNRG |
| | (SEQ ID | QQGNVFSCSVMHEALHNHYT | | | IK (SEQ | EC (SEQ |
| | NO: 676) | QKSLSLSPG (SEQ ID | | | ID NO: | ID NO: |
| | | NO: 44) | | | 686) | 45) |
| MIAB | EVQLLESG | ASTKGPSVFPLAPSSKSTSG | GGGGS | APTSSSTKKT | EIVMTQS | RTVAAPS |
| 24 | GGLVQPGG | GTAALGCLVKDYFPEPVTVS | (SEQ | QLQLEHLLLD | PATLSVS | VFIFPPS |
| | SLRLSCAA | WNSGALTSGVHTFPAVLQSS | ID NO: | LQMILNGINN | PGERATL | DEQLKSG |
| | SGFTFDDY | GLYSLSSVVTVPSSSLGTQT | 23) | YKNPKLTRML | SCRASQN | TASVVCL |
| | AMHWVRQA | YICNVNHKPSNTKVDKKVEP | | TFKFYMPKKA | VNNNLAW | LNNFYPR |
| | PGKGLEWV | KSCDKTHTCPPCPAPEAAGA | | TELKHLQCLE | YQQKPGQ | EAKVQWK |
| | ASITSSSA | PSVFLFPPKPKDTLMISRTP | | EELKPLEEAL | APRLLIY | VDNALQS |
| | FIDYADSV | EVTCVVVDVSHEDPEVKFNW | | NLAPSKNFHL | DATTRAT | GNSQESV |
| | KGRFTISR | YVDGVEVHNAKTKPREEQYN | | RPRDLISDIN | GIPARFS | TEQDSKD |
| | DNSKNTLY | STYRVVSVLTVLHQDWLNGK | | VIVLELKGSE | GSGSGTE | STYSLSS |
| | LQMNSLRA | EYKCKVSNKALPAPIEKTIS | | TTFMCEYADE | FTLTISS | TLTLSKA |
| | EDTAVYYC | KAKGQPREPQVYTLPPSREE | | TATIVEFINR | LQSEDFA | DYEKHKV |
| | ARERVLWN | MTKNQVSLTCLVKGFYPSDI | | WITFSQSIIS | VYYCQQY | YACEVTH |
| | SYFDLWGQ | AVEWESNGQPENNYKTTPPV | | TLT (SEQ | YHWPPTF | QGLSSPV |
| | GTLVTVSS | LDSDGSFFLYSKLTVDKSRW | | ID NO: 41) | GQGTKVE | TKSFNRG |
| | (SEQ ID | QQGNVFSCSVMHEALHNHYT | | | IK (SEQ | EC (SEQ |
| | NO: 676) | QKSLSLSPG (SEQ ID | | | ID NO: | ID NO: |
| | | NO: 44) | | | 687) | 45) |
| MIAB | EVQLLESG | ASTKGPSVFPLAPSSKSTSG | GGGGS | APTSSSTKKT | EIVMTQS | RTVAAPS |
| 25 | GGLVQPGG | GTAALGCLVKDYFPEPVTVS | (SEQ | QLQLEHLLLD | PATLSVS | VFIFPPS |
| | SLRLSCAA | WNSGALTSGVHTFPAVLQSS | ID NO: | LQMILNGINN | PGERATL | DEQLKSG |
| | SGFIFDDY | GLYSLSSVVTVPSSSLGTQT | 23) | YKNPKLTRML | SCRASQS | TASVVCL |
| | AMHWVRQA | YICNVNHKPSNTKVDKKVEP | | TFKFYMPKKA | VSNNLVW | LNNFYPR |
| | PGKGLEWV | KSCDKTHTCPPCPAPEAAGA | | TELKHLQCLE | YQQKPGQ | EAKVQWK |
| | ASITSSSA | PSVFLFPPKPKDTLMISRTP | | EELKPLEEAL | APRLLIY | VDNALQS |
| | FIDYADSV | EVTCVVVDVSHEDPEVKFNW | | NLAPSKNFHL | DASTRAT | GNSQESV |
| | KGRFTISR | YVDGVEVHNAKTKPREEQYN | | RPRDLISDIN | GIPARFS | TEQDSKD |
| | DNSKNTLY | STYRVVSVLTVLHQDWLNGK | | VIVLELKGSE | GSGSGTE | STYSLSS |
| | LQMNSLRA | EYKCKVSNKALPAPIEKTIS | | TTFMCEYADE | FTLTISS | TLTLSKA |
| | EDTAVYYC | KAKGQPREPQVYTLPPSREE | | TATIVEFINR | LQSEDFA | DYEKHKV |
| | ARERVDWF | MTKNQVSLTCLVKGFYPSDI | | WITFSQSIIS | VYYCQQY | YACEVTH |
| | SYFDLWGQ | AVEWESNGQPENNYKTTPPV | | TLT (SEQ | SHWPPTF | QGLSSPV |
| | GTLVTVSS | LDSDGSFFLYSKLTVDKSRW | | ID NO: 41) | GQGTKVE | TKSFNRG |
| | (SEQ ID | QQGNVFSCSVMHEALHNHYT | | | IK (SEQ | EC (SEQ |
| | NO: 688) | QKSLSLSPG (SEQ ID | | | ID NO: | ID NO: |
| | | NO: 44) | | | 689) | 45) |
| MIAB | EVQLLESG | ASTKGPSVFPLAPSSKSTSG | GGGGS | APTSSSTKKT | EIVMTQS | RTVAAPS |
| 26 | GGLVQPGG | GTAALGCLVKDYFPEPVTVS | (SEQ | QLQLEHLLLD | PATLSVS | VFIFPPS |
| | SLRLSCAA | WNSGALTSGVHTFPAVLQSS | ID NO: | LQMILNGINN | PGERATL | DEQLKSG |
| | SGFTFDDY | GLYSLSSVVTVPSSSLGTQT | 23) | YKNPKLTRML | SCRASQS | TASVVCL |
| | AMHWVRQA | YICNVNHKPSNTKVDKKVEP | | TFKFYMPKKA | VYSNLAW | LNNFYPR |
| | PGKGLEWV | KSCDKTHTCPPCPAPEAAGA | | TELKHLQCLE | YQQKPGQ | EAKVQWK |
| | ASITSSSA | PSVFLFPPKPKDTLMISRTP | | EELKPLEEAL | APRLLIY | VDNALQS |
| | FIDYADSV | EVTCVVVDVSHEDPEVKFNW | | NLAPSKNFHL | RASTRAT | GNSQESV |
| | KGRFTISR | YVDGVEVHNAKTKPREEQYN | | RPRDLISDIN | GIPARFS | TEQDSKD |
| | DNSKNTLY | STYRVVSVLTVLHQDWLNGK | | VIVLELKGSE | GSGSGTE | STYSLSS |
| | LQMNSLRA | EYKCKVSNKALPAPIEKTIS | | TTFMCEYADE | FTLTISS | TLTLSKA |
| | EDTAVYYC | KAKGQPREPQVYTLPPSREE | | TATIVEFINR | LQSEDFA | DYEKHKV |
| | ARERVDWN | MTKNQVSLTCLVKGFYPSDI | | WITFSQSIIS | VYYCQQY | YACEVTH |
| | SYFDLWGQ | AVEWESNGQPENNYKTTPPV | | TLT (SEQ | HIWPPTF | QGLSSPV |
| | GTLVTVSS | LDSDGSFFLYSKLTVDKSRW | | ID NO: 41) | GQGTKVE | TKSFNRG |
| | (SEQ ID | QQGNVFSCSVMHEALHNHYT | | | IK (SEQ | EC (SEQ |
| | NO: 664) | QKSLSLSPG (SEQ ID | | | ID NO: | ID NO: |
| | | NO: 44) | | | 690) | 45) |
| MIAB | EVQLLESG | ASTKGPSVFPLAPSSKSTSG | GGGGS | APTSSSTKKT | EIVMTQS | RTVAAPS |
| 27 | GGLVQPGG | GTAALGCLVKDYFPEPVTVS | (SEQ | QLQLEHLLLD | PATLSVS | VFIFPPS |
| | SLRLSCAA | WNSGALTSGVHTFPAVLQSS | ID NO: | LQMILNGINN | PGERATL | DEQLKSG |
| | SGFAFSNF | GLYSLSSVVTVPSSSLGTQT | 23) | YKNPKLTRML | SCRASQS | TASVVCL |
| | AMSWVRQA | YICNVNHKPSNTKVDKKVEP | | TFKFYMPKKA | VTSDLAW | LNNFYPR |
| | PGKGLEWS | KSCDKTHTCPPCPAPEAAGA | | TELKHLQCLE | YQQKPGQ | EAKVQWK |
| | TITSSGGS | PSVFLFPPKPKDTLMISRTP | | EELKPLEEAL | APRLLIY | VDNALQS |
| | TDYADSVK | EVTCVVVDVSHEDPEVKFNW | | NLAPSKNFHL | DASSRAM | GNSQESV |
| | GRFTISRD | YVDGVEVHNAKTKPREEQYN | | RPRDLISDIN | GIPARFS | TEQDSKD |
| | NSKNTLYL | STYRVVSVLTVLHQDWLNGK | | VIVLELKGSE | GSGSGTE | STYSLSS |
| | QMNSLRAE | EYKCKVSNKALPAPIEKTIS | | TTFMCEYADE | FTLTISS | TLTLSKA |
| | DTAVYYKA | KAKGQPREPQVYTLPPSREE | | TATIVEFINR | LQSEDFA | DYEKHKV |
| | RERVDWNS | MTKNQVSLTCLVKGFYPSDI | | WITFSQSIIS | VYYCQQY | YACEVTH |
| | YFNLWGQG | AVEWESNGQPENNYKTTPPV | | TLT (SEQ | STWPPTF | QGLSSPV |
| | TLVTVSS | LDSDGSFFLYSKLTVDKSRW | | ID NO: 41) | GQGTKVE | TKSFNRG |
| | (SEQ ID | QQGNVFSCSVMHEALHNHYT | | | IK (SEQ | EC (SEQ |
| | NO: 691) | QKSLSLSPG (SEQ ID | | | ID NO: | ID NO: |
| | | NO: 44) | | | 692) | 45) |
| MIAB | EVQLLESG | ASTKGPSVFPLAPSSKSTSG | GGGGS | APTSSSTKKT | EIVMTQS | RTVAAPS |
| 28 | GGLVQPGG | GTAALGCLVKDYFPEPVTVS | (SEQ | QLQLEHLLLD | PATLSVS | VFIFPPS |
| | SLRLSCAA | WNSGALTSGVHTFPAVLQSS | ID NO: | LQMILNGINN | PGERATL | DEQLKSG |
| | SGFTFSSF | GLYSLSSVVTVPSSSLGTQT | 23) | YKNPKLTRML | SCRASQS | TASVVCL |
| | ALSWVRQA | YICNVNHKPSNTKVDKKVEP | | TFKFYMPKKA | VTRNLAW | LNNFYPR |
| | PGKGLEWS | KSCDKTHTCPPCPAPEAAGA | | TELKHLQCLE | YQQKPGQ | EAKVQWK |
| | SISSSGSG | PSVFLFPPKPKDTLMISRTP | | EELKPLEEAL | APRLLIY | VDNALQS |
| | GSTNYADS | EVTCVVVDVSHEDPEVKFNW | | NLAPSKNFHL | GESTRAT | GNSQESV |
| | VKGRFTIS | YVDGVEVHNAKTKPREEQYN | | RPRDLISDIN | GIPARFS | TEQDSKD |
| | RDNSKNTL | STYRVVSVLTVLHQDWLNGK | | VIVLELKGSE | GSGSGTE | STYSLSS |
| | YLQMNSLR | EYKCKVSNKALPAPIEKTIS | | TTFMCEYADE | FTLTISS | TLTLSKA |
| | AEDTAVYY | KAKGQPREPQVYTLPPSREE | | TATIVEFINR | LQSEDFA | DYEKHKV |
| | CIRERVDW | MTKNQVSLTCLVKGFYPSDI | | WITFSQSIIS | VYYCQQY | YACEVTH |
| | NSYFDLWG | AVEWESNGQPENNYKTTPPV | | TLT (SEQ | YNWPPSF | QGLSSPV |
| | QGTLVTVS | LDSDGSFFLYSKLTVDKSRW | | ID NO: 41) | GQGTKVE | TKSFNRG |
| | S (SEQ | QQGNVFSCSVMHEALHNHYT | | | IK (SEQ | EC (SEQ |
| | ID NO: | QKSLSLSPG (SEQ ID | | | ID NO: | ID NO: |
| | 693) | NO: 44) | | | 694) | 45) |
| MIAB | EVQLLESG | ASTKGPSVFPLAPSSKSTSG | GGGGS | APTSSSTKKT | EIVMTQS | RTVAAPS |
| 29 | GGLVQPGG | GTAALGCLVKDYFPEPVTVS | (SEQ | QLQLEHLLLD | PATLSVS | VFIFPPS |
| | SLRLSCAA | WNSGALTSGVHTFPAVLQSS | ID NO: | LQMILNGINN | PGERATL | DEQLKSG |
| | SGFTFNDY | GLYSLSSVVTVPSSSLGTQT | 23) | YKNPKLTRML | SCRASQS | TASVVCL |
| | AMTWVRQA | YICNVNHKPSNTKVDKKVEP | | TFKFYMPKKA | VSNTLAW | LNNFYPR |
| | PGKGLEWA | KSCDKTHTCPPCPAPEAAGA | | TELKHLQCLE | YQQKPGQ | EAKVQWK |
| | SISSSGGS | PSVFLFPPKPKDTLMISRTP | | EELKPLEEAL | APRLLIY | VDNALQS |
| | IDYADSVK | EVTCVVVDVSHEDPEVKFNW | | NLAPSKNFHL | GTSNRAA | GNSQESV |
| | GRFTISRD | YVDGVEVHNAKTKPREEQYN | | RPRDLISDIN | GIPARFS | TEQDSKD |
| | NSKNTLYL | STYRVVSVLTVLHQDWLNGK | | VIVLELKGSE | GSGSGTE | STYSLSS |
| | QMNSLRAE | EYKCKVSNKALPAPIEKTIS | | TTFMCEYADE | FTLTISS | TLTLSKA |
| | DTAVYYCA | KAKGQPREPQVYTLPPSREE | | TATIVEFINR | LQSEDFA | DYEKHKV |
| | REKVDWNS | MTKNQVSLTCLVKGFYPSDI | | WITFSQSIIS | VYYCQQY | YACEVTH |
| | YFDLWGQG | AVEWESNGQPENNYKTTPPV | | TLT (SEQ | YTTPLTF | QGLSSPV |
| | TLVTVSS | LDSDGSFFLYSKLTVDKSRW | | ID NO: 41) | GQGTKVE | TKSFNRG |
| | (SEQ ID | QQGNVFSCSVMHEALHNHYT | | | IK (SEQ | EC (SEQ |
| | NO: 695) | QKSLSLSPG (SEQ ID | | | ID NO: | ID NO: |
| | | NO: 44) | | | 696) | 45) |
| MIAB | EVQLLESG | ASTKGPSVFPLAPSSKSTSG | GGGGS | APTSSSTKKT | EIVMTQS | RTVAAPS |
| 30 | GGLVQPGG | GTAALGCLVKDYFPEPVTVS | (SEQ | QLQLEHLLLD | PATLSVS | VFIFPPS |
| | SLRLSCAA | WNSGALTSGVHTFPAVLQSS | ID NO: | LQMILNGINN | PGERATL | DEQLKSG |
| | SGFTFSDY | GLYSLSSVVTVPSSSLGTQT | 23) | YKNPKLTRML | SCRASQS | TASVVCL |
| | AMTWVRQA | YICNVNHKPSNTKVDKKVEP | | TFKFYMPKKA | VISNLAW | LNNFYPR |
| | PGKGLEWS | KSCDKTHTCPPCPAPEAAGA | | TELKHLQCLE | YQQKPGQ | EAKVQWK |
| | AISTSGGS | PSVFLFPPKPKDTLMISRTP | | EELKPLEEAL | APRLLIY | VDNALQS |
| | TYYVDSVK | EVTCVVVDVSHEDPEVKFNW | | NLAPSKNFHL | GASTGAT | GNSQESV |
| | GRFTISRD | YVDGVEVHNAKTKPREEQYN | | RPRDLISDIN | GIPARFS | TEQDSKD |
| | NSKNTLYL | STYRVVSVLTVLHQDWLNGK | | VIVLELKGSE | GSGSGTE | STYSLSS |
| | QMNSLRAE | EYKCKVSNKALPAPIEKTIS | | TTFMCEYADE | FTLTISS | TLTLSKA |
| | DTAVYYCA | KAKGQPREPQVYTLPPSREE | | TATIVEFINR | LQSEDFA | DYEKHKV |
| | RERVDWNS | MTKNQVSLTCLVKGFYPSDI | | WITFSQSIIS | VYYCQQY | YACEVTH |
| | YFDLWGQG | AVEWESNGQPENNYKTTPPV | | TLT (SEQ | NNRPPTF | QGLSSPV |
| | TLVTVSS | LDSDGSFFLYSKLTVDKSRW | | ID NO: 41) | GQGTKVE | TKSFNRG |
| | (SEQ ID | QQGNVFSCSVMHEALHNHYT | | | IK (SEQ | EC (SEQ |
| | NO: 697) | QKSLSLSPG (SEQ ID | | | ID NO: | ID NO: |
| | | NO: 44) | | | 698) | 45) |
| MIAB | EVQLLESG | ASTKGPSVFPLAPSSKSTSG | GGGGS | APTSSSTKKT | EIVMTQS | RTVAAPS |
| 31 | GGLVQPGG | GTAALGCLVKDYFPEPVTVS | (SEQ | QLQLEHLLLD | PATLSVS | VFIFPPS |
| | SLRLSCAA | WNSGALTSGVHTFPAVLQSS | ID NO: | LQMILNGINN | PGERATL | DEQLKSG |
| | SGLTFSSH | GLYSLSSVVTVPSSSLGTQT | 23) | YKNPKLTRML | SCRASQS | TASVVCL |
| | AMSWVRQA | YICNVNHKPSNTKVDKKVEP | | TFKFYMPKKA | VDNNLAW | LNNFYPR |
| | PGKGLEWA | KSCDKTHTCPPCPAPEAAGA | | TELKHLQCLE | YQQKPGQ | EAKVQWK |
| | AITGSGGN | PSVFLFPPKPKDTLMISRTP | | EELKPLEEAL | APRLLIY | VDNALQS |
| | TYYADSVK | EVTCVVVDVSHEDPEVKFNW | | NLAPSKNFHL | GASTRDT | GNSQESV |
| | GRFTISRD | YVDGVEVHNAKTKPREEQYN | | RPRDLISDIN | GIPARFS | TEQDSKD |
| | NSKNTLYL | STYRVVSVLTVLHQDWLNGK | | VIVLELKGSE | GSGSGTE | STYSLSS |
| | QMNSLRAE | EYKCKVSNKALPAPIEKTIS | | TTFMCEYADE | FTLTISS | TLTLSKA |
| | DTAVYYCA | KAKGQPREPQVYTLPPSREE | | TATIVEFINR | LQSEDFA | DYEKHKV |
| | RERSDWNS | MTKNQVSLTCLVKGFYPSDI | | WITFSQSIIS | VYYCQQY | YACEVTH |
| | YFDLHGQG | AVEWESNGQPENNYKTTPPV | | TLT (SEQ | NYWPPTF | QGLSSPV |
| | TLVTVSS | LDSDGSFFLYSKLTVDKSRW | | ID NO: 41) | GQGTKVE | TKSFNRG |
| | (SEQ ID | QQGNVFSCSVMHEALHNHYT | | | IK (SEQ | EC (SEQ |
| | NO: 699) | QKSLSLSPG (SEQ ID | | | ID NO: | ID NO: |
| | | NO: 44) | | | 700) | 45) |
| MIAB | EVQLLESG | ASTKGPSVFPLAPSSKSTSG | GGGGS | APTSSSTKKT | EIVMTQS | RTVAAPS |
| 32 | GGLVQPGG | GTAALGCLVKDYFPEPVTVS | (SEQ | QLQLEHLLLD | PATLSVS | VFIFPPS |
| | SLRLSCAA | WNSGALTSGVHTFPAVLQSS | ID NO: | LQMILNGINN | PGERATL | DEQLKSG |
| | SGFTFDDY | GLYSLSSVVTVPSSSLGTQT | 23) | YKNPKLTRML | SCRASQS | TASVVCL |
| | AMHWVRQA | YICNVNHKPSNTKVDKKVEP | | TFKFYMPKKA | ISNNLAW | LNNFYPR |
| | PGKGLEWV | KSCDKTHTCPPCPAPEAAGA | | TELKHLQCLE | YQQKPGQ | EAKVQWK |
| | ASITSSSA | PSVFLFPPKPKDTLMISRTP | | EELKPLEEAL | APRLLIY | VDNALQS |
| | FIDYADSV | EVTCVVVDVSHEDPEVKFNW | | NLAPSKNFHL | DVSTRAT | GNSQESV |
| | KGRFTISR | YVDGVEVHNAKTKPREEQYN | | RPRDLISDIN | GIPARFS | TEQDSKD |
| | DNSKNTLY | STYRVVSVLTVLHQDWLNGK | | VIVLELKGSE | GSGSGTE | STYSLSS |
| | LQMNSLRA | EYKCKVSNKALPAPIEKTIS | | TTFMCEYADE | FTLTISS | TLTLSKA |
| | EDTAVYYC | KAKGQPREPQVYTLPPSREE | | TATIVEFINR | LQSEDFA | DYEKHKV |
| | ARERVDWW | MTKNQVSLTCLVKGFYPSDI | | WITFSQSIIS | VYYCQQY | YACEVTH |
| | SYFDLWGQ | AVEWESNGQPENNYKTTPPV | | TLT (SEQ | SLWPPTF | QGLSSPV |
| | GTLVTVSS | LDSDGSFFLYSKLTVDKSRW | | ID NO: 41) | GQGTKVE | TKSFNRG |
| | (SEQ ID | QQGNVFSCSVMHEALHNHYT | | | IK (SEQ | EC (SEQ |
| | NO: 701) | QKSLSLSPG (SEQ ID | | | ID NO: | ID NO: |
| | | NO: 44) | | | 702) | 45) |
| MIAB | EVQLLESG | ASTKGPSVFPLAPSSKSTSG | GGGGS | APTSSSTKKT | EIVMTQS | RTVAAPS |
| 33 | GGLVQPGG | GTAALGCLVKDYFPEPVTVS | (SEQ | QLQLEHLLLD | PATLSVS | VFIFPPS |
| | SLRLSCAA | WNSGALTSGVHTFPAVLQSS | ID NO: | LQMILNGINN | PGERATL | DEQLKSG |
| | SGFTLSSY | GLYSLSSVVTVPSSSLGTQT | 23) | YKNPKLTRML | SCRASRS | TASVVCL |
| | GMSWVRQA | YICNVNHKPSNTKVDKKVEP | | TFKFYMPKKA | ISSNLAW | LNNFYPR |
| | PGKGLEWA | KSCDKTHTCPPCPAPEAAGA | | TELKHLQCLE | YQQKPGQ | EAKVQWK |
| | SITGSGDT | PSVFLFPPKPKDTLMISRTP | | EELKPLEEAL | APRLLIY | VDNALQS |
| | SYYADSVK | EVTCVVVDVSHEDPEVKFNW | | NLAPSKNFHL | DAFTRAT | GNSQESV |
| | GRFTISRD | YVDGVEVHNAKTKPREEQYN | | RPRDLISDIN | GIPARFS | TEQDSKD |
| | NSKNTLYL | STYRVVSVLTVLHQDWLNGK | | VIVLELKGSE | GSGSGTE | STYSLSS |
| | QMNSLRAE | EYKCKVSNKALPAPIEKTIS | | TTFMCEYADE | FTLTISS | TLTLSKA |
| | DTAVYYCA | KAKGQPREPQVYTLPPSREE | | TATIVEFINR | LQSEDFA | DYEKHKV |
| | RERVDWNS | MTKNQVSLTCLVKGFYPSDI | | WITFSQSIIS | VYYCQQY | YACEVTH |
| | YFDRWGQG | AVEWESNGQPENNYKTTPPV | | TLT (SEQ | DTWPETF | QGLSSPV |
| | TLVTVSS | LDSDGSFFLYSKLTVDKSRW | | ID NO: 41) | GQGTKVE | TKSFNRG |
| | (SEQ ID | QQGNVFSCSVMHEALHNHYT | | | IK (SEQ | EC (SEQ |
| | NO: 703) | QKSLSLSPG (SEQ ID | | | ID NO: | ID NO: |
| | | NO: 44) | | | 704) | 45) |
| MIAB | EVQLLESG | ASTKGPSVFPLAPSSKSTSG | GGGGS | APTSSSTKKT | EIVMTQS | RTVAAPS |
| 34 | GGLVQPGG | GTAALGCLVKDYFPEPVTVS | (SEQ | QLQLEHLLLD | PATLSVS | VFIFPPS |
| | SLRLSCAA | WNSGALTSGVHTFPAVLQSS | ID NO: | LQMILNGINN | PGERATL | DEQLKSG |
| | SGFTFSTY | GLYSLSSVVTVPSSSLGTQT | 23) | YKNPKLTRML | SCRASQS | TASVVCL |
| | VMTWVRQA | YICNVNHKPSNTKVDKKVEP | | TFKFYMPKKA | VSVNLAW | LNNFYPR |
| | PGKGLEWA | KSCDKTHTCPPCPAPEAAGA | | TELKHLQCLE | YQQKPGQ | EAKVQWK |
| | SISYSGGF | PSVFLFPPKPKDTLMISRTP | | EELKPLEEAL | APRLLIY | VDNALQS |
| | IYYADSVK | EVTCVVVDVSHEDPEVKFNW | | NLAPSKNFHL | DVSIRAT | GNSQESV |
| | GRFTISRD | YVDGVEVHNAKTKPREEQYN | | RPRDLISDIN | GIPARFS | TEQDSKD |
| | NSKNTLYL | STYRVVSVLTVLHQDWLNGK | | VIVLELKGSE | GSGSGTE | STYSLSS |
| | QMNSLRAE | EYKCKVSNKALPAPIEKTIS | | TTFMCEYADE | FTLTISS | TLTLSKA |
| | DTAVYYCA | KAKGQPREPQVYTLPPSREE | | TATIVEFINR | LQSEDFA | DYEKHKV |
| | RERVMWNS | MTKNQVSLTCLVKGFYPSDI | | WITFSQSIIS | VYYCQQY | YACEVTH |
| | YFDLWGQG | AVEWESNGQPENNYKTTPPV | | TLT (SEQ | TTWPPTF | QGLSSPV |
| | TLVTVSS | LDSDGSFFLYSKLTVDKSRW | | ID NO: 41) | GQGTKVE | TKSFNRG |
| | (SEQ ID | QQGNVFSCSVMHEALHNHYT | | | IK (SEQ | EC (SEQ |
| | NO: 705) | QKSLSLSPG (SEQ ID | | | ID NO: | ID NO: |
| | | NO: 44) | | | 706) | 45) |
| MIAB | EVQLLESG | ASTKGPSVFPLAPSSKSTSG | GGGGS | APTSSSTKKT | EIVMTQS | RTVAAPS |
| 35 | GGLVQPGG | GTAALGCLVKDYFPEPVTVS | (SEQ | QLQLEHLLLD | PATLSVS | VFIFPPS |
| | SLRLSCAA | WNSGALTSGVHTFPAVLQSS | ID NO: | LQMILNGINN | PGERATL | DEQLKSG |
| | SGFTFDDY | GLYSLSSVVTVPSSSLGTQT | 23) | YKNPKLTRML | SCRASQS | TASVVCL |
| | AMHWVRQA | YICNVNHKPSNTKVDKKVEP | | TFKFYMPKKA | VNNYLAW | LNNFYPR |
| | PGKGLEWV | KSCDKTHTCPPCPAPEAAGA | | TELKHLQCLE | YQQKPGQ | EAKVQWK |
| | ASITSSSA | PSVFLFPPKPKDTLMISRTP | | EELKPLEEAL | APRLLIY | VDNALQS |
| | FIDYADSV | EVTCVVVDVSHEDPEVKFNW | | NLAPSKNFHL | DTSSRAT | GNSQESV |
| | KGRFTISR | YVDGVEVHNAKTKPREEQYN | | RPRDLISDIN | GIPARFS | TEQDSKD |
| | DNSKNTLY | STYRVVSVLTVLHQDWLNGK | | VIVLELKGSE | GSGSGTE | STYSLSS |
| | LQMNSLRA | EYKCKVSNKALPAPIEKTIS | | TTFMCEYADE | FTLTISS | TLTLSKA |
| | EDTAVYYC | KAKGQPREPQVYTLPPSREE | | TATIVEFINR | LQSEDFA | DYEKHKV |
| | NRERVDWN | MTKNQVSLTCLVKGFYPSDI | | WITFSQSIIS | VYYCQQY | YACEVTH |
| | SYFDLWGQ | AVEWESNGQPENNYKTTPPV | | TLT (SEQ | HSWPPTF | QGLSSPV |
| | GTLVTVSS | LDSDGSFFLYSKLTVDKSRW | | ID NO: 41) | GQGTKVE | TKSFNRG |
| | (SEQ ID | QQGNVFSCSVMHEALHNHYT | | | IK (SEQ | EC (SEQ |
| | NO: 707) | QKSLSLSPG (SEQ ID | | | ID NO: | ID NO: |
| | | NO: 44) | | | 708) | 45) |
| MIAB | EVQLLESG | ASTKGPSVFPLAPSSKSTSG | GGGGS | APTSSSTKKT | EIVMTQS | RTVAAPS |
| 36 | GGLVQPGG | GTAALGCLVKDYFPEPVTVS | (SEQ | QLQLEHLLLD | PATLSVS | VFIFPPS |
| | SLRLSCAA | WNSGALTSGVHTFPAVLQSS | ID NO: | LQMILNGINN | PGERATL | DEQLKSG |
| | SGFIFSDY | GLYSLSSVVTVPSSSLGTQT | 23) | YKNPKLTRML | SCRASQS | TASVVCL |
| | AMSWVRQA | YICNVNHKPSNTKVDKKVEP | | TFKFYMPKKA | ITTNLAW | LNNFYPR |
| | PGKGLEWS | KSCDKTHTCPPCPAPEAAGA | | TELKHLQCLE | YQQKPGQ | EAKVQWK |
| | AISGSGGS | PSVFLFPPKPKDTLMISRTP | | EELKPLEEAL | APRLLIY | VDNALQS |
| | TYYTDSVK | EVTCVVVDVSHEDPEVKFNW | | NLAPSKNFHL | SASTRAT | GNSQESV |
| | GRFTISRD | YVDGVEVHNAKTKPREEQYN | | RPRDLISDIN | GIPARFS | TEQDSKD |
| | NSKNTLYL | STYRVVSVLTVLHQDWLNGK | | VIVLELKGSE | GSGSGTE | STYSLSS |
| | QMNSLRAE | EYKCKVSNKALPAPIEKTIS | | TTFMCEYADE | FTLTISS | TLTLSKA |
| | DTAVYYCA | KAKGQPREPQVYTLPPSREE | | TATIVEFINR | LQSEDFA | DYEKHKV |
| | REMVDWNS | MTKNQVSLTCLVKGFYPSDI | | WITFSQSIIS | VYYCQQY | YACEVTH |
| | YFDLWGQG | AVEWESNGQPENNYKTTPPV | | TLT (SEQ | YDWPFTF | QGLSSPV |
| | TLVTVSS | LDSDGSFFLYSKLTVDKSRW | | ID NO: 41) | GQGTKVE | TKSFNRG |
| | (SEQ ID | QQGNVFSCSVMHEALHNHYT | | | IK (SEQ | EC (SEQ |
| | NO: 709) | QKSLSLSPG (SEQ ID | | | ID NO: | ID NO: |
| | | NO: 44) | | | 710) | 45) |
| MIAB | EVQLLESG | ASTKGPSVFPLAPSSKSTSG | GGGGS | APTSSSTKKT | EIVMTQS | RTVAAPS |
| 37 | GGLVQPGG | GTAALGCLVKDYFPEPVTVS | (SEQ | QLQLEHLLLD | PATLSVS | VFIFPPS |
| | SLRLSCAA | WNSGALTSGVHTFPAVLQSS | ID NO: | LQMILNGINN | PGERATL | DEQLKSG |
| | SGFTFDDY | GLYSLSSVVTVPSSSLGTQT | 23) | YKNPKLTRML | SCRASQG | TASVVCL |
| | AMHWVRQA | YICNVNHKPSNTKVDKKVEP | | TFKFYMPKKA | ISNSYLA | LNNFYPR |
| | PGKGLEWV | KSCDKTHTCPPCPAPEAAGA | | TELKHLQCLE | WYQQKPG | EAKVQWK |
| | ASITSSSA | PSVFLFPPKPKDTLMISRTP | | EELKPLEEAL | QAPRLLI | VDNALQS |
| | FIDYADSV | EVTCVVVDVSHEDPEVKFNW | | NLAPSKNFHL | YGASTRA | GNSQESV |
| | KGRFTISR | YVDGVEVHNAKTKPREEQYN | | RPRDLISDIN | TGIPARF | TEQDSKD |
| | DNSKNTLY | STYRVVSVLTVLHQDWLNGK | | VIVLELKGSE | SGSGSGT | STYSLSS |
| | LQMNSLRA | EYKCKVSNKALPAPIEKTIS | | TTFMCEYADE | EFTLTIS | TLTLSKA |
| | EDTAVYYC | KAKGQPREPQVYTLPPSREE | | TATIVEFINR | SLQSEDF | DYEKHKV |
| | AQERVDWN | MTKNQVSLTCLVKGFYPSDI | | WITFSQSIIS | AVYYCQQ | YACEVTH |
| | SYFDLWGQ | AVEWESNGQPENNYKTTPPV | | TLT (SEQ | YYTYPPT | QGLSSPV |
| | GTLVTVSS | LDSDGSFFLYSKLTVDKSRW | | ID NO: 41) | FGQGTKV | TKSFNRG |
| | (SEQ ID | QQGNVFSCSVMHEALHNHYT | | | EIK | EC (SEQ |
| | NO: 711) | QKSLSLSPG (SEQ ID | | | (SEQ ID | ID NO: |
| | | NO: 44) | | | NO: | 45) |
| | | | | | 663) | |
| MIAB | EVQLLESG | ASTKGPSVFPLAPSSKSTSG | GGGGS | APTSSSTKKT | EIVMTQS | RTVAAPS |
| 38 | GGLVQPGG | GTAALGCLVKDYFPEPVTVS | (SEQ | QLQLEHLLLD | PATLSVS | VFIFPPS |
| | SLRLSCAA | WNSGALTSGVHTFPAVLQSS | ID NO: | LQMILNGINN | PGERATL | DEQLKSG |
| | SGFTFRNY | GLYSLSSVVTVPSSSLGTQT | 23) | YKNPKLTRML | SCRASQS | TASVVCL |
| | AMTWVRQA | YICNVNHKPSNTKVDKKVEP | | TFKFYMPKKA | IGNNLAW | LNNFYPR |
| | PGKGLEWS | KSCDKTHTCPPCPAPEAAGA | | TELKHLQCLE | YQQKPGQ | EAKVQWK |
| | SISSSGGS | PSVFLFPPKPKDTLMISRTP | | EELKPLEEAL | APRLLIY | VDNALQS |
| | TYYADSVK | EVTCVVVDVSHEDPEVKFNW | | NLAPSKNFHL | DVSTRAT | GNSQESV |
| | GRFTISRD | YVDGVEVHNAKTKPREEQYN | | RPRDLISDIN | GIPARFS | TEQDSKD |
| | NSKNTLYL | STYRVVSVLTVLHQDWLNGK | | VIVLELKGSE | GSGSGTE | STYSLSS |
| | QMNSLRAE | EYKCKVSNKALPAPIEKTIS | | TTFMCEYADE | FTLTISS | TLTLSKA |
| | DTAVYYCA | KAKGQPREPQVYTLPPSREE | | TATIVEFINR | LQSEDFA | DYEKHKV |
| | RERVDYNS | MTKNQVSLTCLVKGFYPSDI | | WITFSQSIIS | VYYCQQY | YACEVTH |
| | YFDLWGQG | AVEWESNGQPENNYKTTPPV | | TLT (SEQ | KHWPPTF | QGLSSPV |
| | TLVTVSS | LDSDGSFFLYSKLTVDKSRW | | ID NO: 41) | GQGTKVE | TKSFNRG |
| | (SEQ ID | QQGNVFSCSVMHEALHNHYT | | | IK (SEQ | EC (SEQ |
| | NO: 712) | QKSLSLSPG (SEQ ID | | | ID NO: | ID NO: |
| | | NO: 44) | | | 713) | 45) |
| MIAB | EVQLLESG | ASTKGPSVFPLAPSSKSTSG | GGGGS | APTSSSTKKT | EIVMTQS | RTVAAPS |
| 39 | GGLVQPGG | GTAALGCLVKDYFPEPVTVS | (SEQ | QLQLEHLLLD | PATLSVS | VFIFPPS |
| | SLRLSCAA | WNSGALTSGVHTFPAVLQSS | ID NO: | LQMILNGINN | PGERATL | DEQLKSG |
| | SGFTLRNY | GLYSLSSVVTVPSSSLGTQT | 23) | YKNPKLTRML | SCRASQS | TASVVCL |
| | AMSWVRQA | YICNVNHKPSNTKVDKKVEP | | TFKFYMPKKA | VSNNVAW | LNNFYPR |
| | PGKGLEWS | KSCDKTHTCPPCPAPEAAGA | | TELKHLQCLE | YQQKPGQ | EAKVQWK |
| | AISGSGGS | PSVFLFPPKPKDTLMISRTP | | EELKPLEEAL | APRLLIY | VDNALQS |
| | TSYADSVK | EVTCVVVDVSHEDPEVKFNW | | NLAPSKNFHL | ASSTRAT | GNSQESV |
| | GRFTISRD | YVDGVEVHNAKTKPREEQYN | | RPRDLISDIN | GIPARFS | TEQDSKD |
| | NSKNTLYL | STYRVVSVLTVLHQDWLNGK | | VIVLELKGSE | GSGSGTE | STYSLSS |
| | QMNSLRAE | EYKCKVSNKALPAPIEKTIS | | TTFMCEYADE | FTLTISS | TLTLSKA |
| | DTAVYYCD | KAKGQPREPQVYTLPPSREE | | TATIVEFINR | LQSEDFA | DYEKHKV |
| | RERVDWNS | MTKNQVSLTCLVKGFYPSDI | | WITFSQSIIS | VYYCQQY | YACEVTH |
| | YFDLWGQG | AVEWESNGQPENNYKTTPPV | | TLT (SEQ | NTWPFTF | QGLSSPV |
| | TLVTVSS | LDSDGSFFLYSKLTVDKSRW | | ID NO: 41) | GQGTKVE | TKSFNRG |
| | (SEQ ID | QQGNVFSCSVMHEALHNHYT | | | IK (SEQ | EC (SEQ |
| | NO: 714) | QKSLSLSPG (SEQ ID | | | ID NO: | ID NO: |
| | | NO: 44) | | | 715) | 45) |
| MIAB | EVQLLESG | ASTKGPSVFPLAPSSKSTSG | GGGGS | APTSSSTKKT | EIVMTQS | RTVAAPS |
| 40 | GGLVQPGG | GTAALGCLVKDYFPEPVTVS | (SEQ | QLQLEHLLLD | PATLSVS | VFIFPPS |
| | SLRLSCAA | WNSGALTSGVHTFPAVLQSS | ID NO: | LQMILNGINN | PGERATL | DEQLKSG |
| | SGFTFDTY | GLYSLSSVVTVPSSSLGTQT | 23) | YKNPKLTRML | SCRASQS | TASVVCL |
| | AMNWVRQA | YICNVNHKPSNTKVDKKVEP | | TFKFYMPKKA | FSSNLAW | LNNFYPR |
| | PGKGLEWF | KSCDKTHTCPPCPAPEAAGA | | TELKHLQCLE | YQQKPGQ | EAKVQWK |
| | GISGSGGS | PSVFLFPPKPKDTLMISRTP | | EELKPLEEAL | APRLLIY | VDNALQS |
| | PYYADSVK | EVTCVVVDVSHEDPEVKFNW | | NLAPSKNFHL | GASTRST | GNSQESV |
| | GRFTISRD | YVDGVEVHNAKTKPREEQYN | | RPRDLISDIN | GIPARFS | TEQDSKD |
| | NSKNTLYL | STYRVVSVLTVLHQDWLNGK | | VIVLELKGSE | GSGSGTE | STYSLSS |
| | QMNSLRAE | EYKCKVSNKALPAPIEKTIS | | TTFMCEYADE | FTLTISS | TLTLSKA |
| | DTAVYYCA | KAKGQPREPQVYTLPPSREE | | TATIVEFINR | LQSEDFA | DYEKHKV |
| | RERVLWNS | MTKNQVSLTCLVKGFYPSDI | | WITFSQSIIS | VYYCQQY | YACEVTH |
| | YFDLWGQG | AVEWESNGQPENNYKTTPPV | | TLT (SEQ | YDWPITF | QGLSSPV |
| | TLVTVSS | LDSDGSFFLYSKLTVDKSRW | | ID NO: 41) | GQGTKVE | TKSFNRG |
| | (SEQ ID | QQGNVFSCSVMHEALHNHYT | | | IK (SEQ | EC (SEQ |
| | NO: 716) | QKSLSLSPG (SEQ ID | | | ID NO: | ID NO: |
| | | NO: 44) | | | 717) | 45) |
| MIAB | EVQLLESG | ASTKGPSVFPLAPSSKSTSG | GGGGS | APTSSSTKKT | EIVMTQS | RTVAAPS |
| 41 | GGLVQPGG | GTAALGCLVKDYFPEPVTVS | (SEQ | QLQLEHLLLD | PATLSVS | VFIFPPS |
| | SLRLSCAA | WNSGALTSGVHTFPAVLQSS | ID NO: | LQMILNGINN | PGERATL | DEQLKSG |
| | SGFTFSDY | GLYSLSSVVTVPSSSLGTQT | 23) | YKNPKLTRML | SCRASQS | TASVVCL |
| | ALSWVRQA | YICNVNHKPSNTKVDKKVEP | | TFKFYMPKKA | IRNNLAW | LNNFYPR |
| | PGKGLEWS | KSCDKTHTCPPCPAPEAAGA | | TELKHLQCLE | YQQKPGQ | EAKVQWK |
| | TISGSGGN | PSVFLFPPKPKDTLMISRTP | | EELKPLEEAL | APRLLIY | VDNALQS |
| | TYYADSVK | EVTCVVVDVSHEDPEVKFNW | | NLAPSKNFHL | DASSRAT | GNSQESV |
| | GRFTISRD | YVDGVEVHNAKTKPREEQYN | | RPRDLISDIN | GIPARFS | TEQDSKD |
| | NSKNTLYL | STYRVVSVLTVLHQDWLNGK | | VIVLELKGSE | GSGSGTE | STYSLSS |
| | QMNSLRAE | EYKCKVSNKALPAPIEKTIS | | TTFMCEYADE | FTLTISS | TLTLSKA |
| | DTAVYYCE | KAKGQPREPQVYTLPPSREE | | TATIVEFINR | LQSEDFA | DYEKHKV |
| | RERVDWNS | MTKNQVSLTCLVKGFYPSDI | | WITFSQSIIS | VYYCQQY | YACEVTH |
| | YFDLWGQG | AVEWESNGQPENNYKTTPPV | | TLT (SEQ | YIWPLTF | QGLSSPV |
| | TLVTVSS | LDSDGSFFLYSKLTVDKSRW | | ID NO: 41) | GQGTKVE | TKSFNRG |
| | (SEQ ID | QQGNVFSCSVMHEALHNHYT | | | IK (SEQ | EC (SEQ |
| | NO: 718) | QKSLSLSPG (SEQ ID | | | ID NO: | ID NO: |
| | | NO: 44) | | | 719) | 45) |
| MIAB | EVQLLESG | ASTKGPSVFPLAPSSKSTSG | GGGGS | APTSSSTKKT | EIVMTQS | RTVAAPS |
| 42 | GGLVQPGG | GTAALGCLVKDYFPEPVTVS | (SEQ | QLQLEHLLLD | PATLSVS | VFIFPPS |
| | SLRLSCAA | WNSGALTSGVHTFPAVLQSS | ID NO: | LQMILNGINN | PGERATL | DEQLKSG |
| | SGFTFSSS | GLYSLSSVVTVPSSSLGTQT | 23) | YKNPKLTRML | SCRASQS | TASVVCL |
| | AMSWVRQA | YICNVNHKPSNTKVDKKVEP | | TFKFYMPKKA | ISSDLAW | LNNFYPR |
| | PGKGLEWS | KSCDKTHTCPPCPAPEAAGA | | TELKHLQCLE | YQQKPGQ | EAKVQWK |
| | AISGSGGS | PSVFLFPPKPKDTLMISRTP | | EELKPLEEAL | APRLLIY | VDNALQS |
| | TYYTDSVK | EVTCVVVDVSHEDPEVKFNW | | NLAPSKNFHL | GASTTAT | GNSQESV |
| | GRFTISRD | YVDGVEVHNAKTKPREEQYN | | RPRDLISDIN | GIPARFS | TEQDSKD |
| | NSKNTLYL | STYRVVSVLTVLHQDWLNGK | | VIVLELKGSE | GSGSGTE | STYSLSS |
| | QMNSLRAE | EYKCKVSNKALPAPIEKTIS | | TTFMCEYADE | FTLTISS | TLTLSKA |
| | DTAVYYCA | KAKGQPREPQVYTLPPSREE | | TATIVEFINR | LQSEDFA | DYEKHKV |
| | REVVDWNS | MTKNQVSLTCLVKGFYPSDI | | WITFSQSIIS | VYYCQQY | YACEVTH |
| | YFDLWGQG | AVEWESNGQPENNYKTTPPV | | TLT (SEQ | STWPLTF | QGLSSPV |
| | TLVTVSS | LDSDGSFFLYSKLTVDKSRW | | ID NO: 41) | GQGTKVE | TKSFNRG |
| | (SEQ ID | QQGNVFSCSVMHEALHNHYT | | | IK (SEQ | EC (SEQ |
| | NO: 720) | QKSLSLSPG (SEQ ID | | | ID NO: | ID NO: |
| | | NO: 44) | | | 721) | 45) |
| MIAB | EVQLLESG | ASTKGPSVFPLAPSSKSTSG | GGGGS | APTSSSTKKT | EIVMTQS | RTVAAPS |
| 43 | GGLVQPGG | GTAALGCLVKDYFPEPVTVS | (SEQ | QLQLEHLLLD | PATLSVS | VFIFPPS |
| | SLRLSCAA | WNSGALTSGVHTFPAVLQSS | ID NO: | LQMILNGINN | PGERATL | DEQLKSG |
| | SGFTFSTH | GLYSLSSVVTVPSSSLGTQT | 23) | YKNPKLTRML | SCRASQS | TASVVCL |
| | AMTWVRQA | YICNVNHKPSNTKVDKKVEP | | TFKFYMPKKA | VSNDLAW | LNNFYPR |
| | PGKGLEWS | KSCDKTHTCPPCPAPEAAGA | | TELKHLQCLE | YQQKPGQ | EAKVQWK |
| | TISGSGAT | PSVFLFPPKPKDTLMISRTP | | EELKPLEEAL | APRLLIY | VDNALQS |
| | TEYADSVK | EVTCVVVDVSHEDPEVKFNW | | NLAPSKNFHL | DASTRVT | GNSQESV |
| | GRFTISRD | YVDGVEVHNAKTKPREEQYN | | RPRDLISDIN | GIPARFS | TEQDSKD |
| | NSKNTLYL | STYRVVSVLTVLHQDWLNGK | | VIVLELKGSE | GSGSGTE | STYSLSS |
| | QMNSLRAE | EYKCKVSNKALPAPIEKTIS | | TTFMCEYADE | FTLTISS | TLTLSKA |
| | DTAVYYCA | KAKGQPREPQVYTLPPSREE | | TATIVEFINR | LQSEDFA | DYEKHKV |
| | RETVDWNS | MTKNQVSLTCLVKGFYPSDI | | WITFSQSIIS | VYYCQQY | YACEVTH |
| | YFDLWGQG | AVEWESNGQPENNYKTTPPV | | TLT (SEQ | NHWPPTF | QGLSSPV |
| | TLVTVSS | LDSDGSFFLYSKLTVDKSRW | | ID NO: 41) | GQGTKVE | TKSFNRG |
| | (SEQ ID | QQGNVFSCSVMHEALHNHYT | | | IK (SEQ | EC (SEQ |
| | NO: 722) | QKSLSLSPG (SEQ ID | | | ID NO: | ID NO: |
| | | NO: 44) | | | 723) | 45) |
| MIAB | EVQLLESG | ASTKGPSVFPLAPSSKSTSG | GGGGS | APTSSSTKKT | EIVMTQS | RTVAAPS |
| 44 | GGLVQPGG | GTAALGCLVKDYFPEPVTVS | (SEQ | QLQLEHLLLD | PATLSVS | VFIFPPS |
| | SLRLSCAA | WNSGALTSGVHTFPAVLQSS | ID NO: | LQMILNGINN | PGERATL | DEQLKSG |
| | SGFTFSNY | GLYSLSSVVTVPSSSLGTQT | 23) | YKNPKLTRML | SCRASQN | TASVVCL |
| | PMTWVRQA | YICNVNHKPSNTKVDKKVEP | | TFKFYMPKKA | VRSNLAW | LNNFYPR |
| | PGKGLEWS | KSCDKTHTCPPCPAPEAAGA | | TELKHLQCLE | YQQKPGQ | EAKVQWK |
| | SISWSGGS | PSVFLFPPKPKDTLMISRTP | | EELKPLEEAL | APRLLIY | VDNALQS |
| | IDYDDSVK | EVTCVVVDVSHEDPEVKFNW | | NLAPSKNFHL | DASTTAT | GNSQESV |
| | GRFTISRD | YVDGVEVHNAKTKPREEQYN | | RPRDLISDIN | GIPARFS | TEQDSKD |
| | NSKNTLYL | STYRVVSVLTVLHQDWLNGK | | VIVLELKGSE | GSGSGTE | STYSLSS |
| | QMNSLRAE | EYKCKVSNKALPAPIEKTIS | | TTFMCEYADE | FTLTISS | TLTLSKA |
| | DTAVYYCA | KAKGQPREPQVYTLPPSREE | | TATIVEFINR | LQSEDFA | DYEKHKV |
| | REHVDWNS | MTKNQVSLTCLVKGFYPSDI | | WITFSQSIIS | VYYCQQY | YACEVTH |
| | YFDLWGQG | AVEWESNGQPENNYKTTPPV | | TLT (SEQ | DTWPLTF | QGLSSPV |
| | TLVTVSS | LDSDGSFFLYSKLTVDKSRW | | ID NO: 41) | GQGTKVE | TKSFNRG |
| | (SEQ ID | QQGNVFSCSVMHEALHNHYT | | | IK (SEQ | EC (SEQ |
| | NO: 724) | QKSLSLSPG (SEQ ID | | | ID NO: | ID NO: |
| | | NO: 44) | | | 725 | 45) |
| MIAB | EVQLLESG | ASTKGPSVFPLAPSSKSTSG | GGGGS | APTSSSTKKT | EIVMTQS | RTVAAPS |
| 45 | GGLVQPGG | GTAALGCLVKDYFPEPVTVS | (SEQ | QLQLEHLLLD | PATLSVS | VFIFPPS |
| | SLRLSCAA | WNSGALTSGVHTFPAVLQSS | ID NO: | LQMILNGINN | PGERATL | DEQLKSG |
| | SGFTFRDY | GLYSLSSVVTVPSSSLGTQT | 23) | YKNPKLTRML | SCRASQS | TASVVCL |
| | AMSWVRQA | YICNVNHKPSNTKVDKKVEP | | TFKFYMPKKA | VSSLLAW | LNNFYPR |
| | PGKGLEWS | KSCDKTHTCPPCPAPEAAGA | | TELKHLQCLE | YQQKPGQ | EAKVQWK |
| | SISGSGGS | PSVFLFPPKPKDTLMISRTP | | EELKPLEEAL | APRLLIY | VDNALQS |
| | IDYADSVK | EVTCVVVDVSHEDPEVKFNW | | NLAPSKNFHL | AASTRAT | GNSQESV |
| | GRFTISRD | YVDGVEVHNAKTKPREEQYN | | RPRDLISDIN | GIPARFS | TEQDSKD |
| | NSKNTLYL | STYRVVSVLTVLHQDWLNGK | | VIVLELKGSE | GSGSGTE | STYSLSS |
| | QMNSLRAE | EYKCKVSNKALPAPIEKTIS | | TTFMCEYADE | FTLTISS | TLTLSKA |
| | DTAVYYCA | KAKGQPREPQVYTLPPSREE | | TATIVEFINR | LQSEDFA | DYEKHKV |
| | RERVDWNS | MTKNQVSLTCLVKGFYPSDI | | WITFSQSIIS | VYYCQQY | YACEVTH |
| | YFDAWGQG | AVEWESNGQPENNYKTTPPV | | TLT (SEQ | GTWPQTF | QGLSSPV |
| | TLVTVSS | LDSDGSFFLYSKLTVDKSRW | | ID NO: 41) | GQGTKVE | TKSFNRG |
| | (SEQ ID | QQGNVFSCSVMHEALHNHYT | | | IK (SEQ | EC (SEQ |
| | NO: 726) | QKSLSLSPG (SEQ ID | | | ID NO: | ID NO: |
| | | NO: 44) | | | 727) | 45) |
| MIAB | EVQLLESG | ASTKGPSVFPLAPSSKSTSG | GGGGS | APTSSSTKKT | EIVMTQS | RTVAAPS |
| 46 | GGLVQPGG | GTAALGCLVKDYFPEPVTVS | (SEQ | QLQLEHLLLD | PATLSVS | VFIFPPS |
| | SLRLSCAA | WNSGALTSGVHTFPAVLQSS | ID NO: | LQMILNGINN | PGERATL | DEQLKSG |
| | SGFTLSSY | GLYSLSSVVTVPSSSLGTQT | 23) | YKNPKLTRML | SCRASQS | TASVVCL |
| | AMSWVRQA | YICNVNHKPSNTKVDKKVEP | | TFKFYMPKKA | FSSNLAW | LNNFYPR |
| | PGKGLEWA | KSCDKTHTCPPCPAPEAAGA | | TELKHLQCLE | YQQKPGQ | EAKVQWK |
| | GISGSGGR | PSVFLFPPKPKDTLMISRTP | | EELKPLEEAL | APRLLIY | VDNALQS |
| | TYYADSVK | EVTCVVVDVSHEDPEVKFNW | | NLAPSKNFHL | DVSTRAT | GNSQESV |
| | GRFTISRD | YVDGVEVHNAKTKPREEQYN | | RPRDLISDIN | GIPARFS | TEQDSKD |
| | NSKNTLYL | STYRVVSVLTVLHQDWLNGK | | VIVLELKGSE | GSGSGTE | STYSLSS |
| | QMNSLRAE | EYKCKVSNKALPAPIEKTIS | | TTFMCEYADE | FTLTISS | TLTLSKA |
| | DTAVYYCA | KAKGQPREPQVYTLPPSREE | | TATIVEFINR | LQSEDFA | DYEKHKV |
| | RIRVDWNS | MTKNQVSLTCLVKGFYPSDI | | WITFSQSIIS | VYYCQQY | YACEVTH |
| | YFDLWGQG | AVEWESNGQPENNYKTTPPV | | TLT (SEQ | NHWPPTF | QGLSSPV |
| | TLVTVSS | LDSDGSFFLYSKLTVDKSRW | | ID NO: 41) | GQGTKVE | TKSFNRG |
| | (SEQ ID | QQGNVFSCSVMHEALHNHYT | | | IK (SEQ | EC (SEQ |
| | NO: 728) | QKSLSLSPG (SEQ ID | | | ID NO: | ID NO: |
| | | NO: 44) | | | 729) | 45) |
| MIAB | EVQLLESG | ASTKGPSVFPLAPSSKSTSG | GGGGS | APTSSSTKKT | EIVMTQS | RTVAAPS |
| 47 | GGLVQPGG | GTAALGCLVKDYFPEPVTVS | (SEQ | QLQLEHLLLD | PATLSVS | VFIFPPS |
| | SLRLSCAA | WNSGALTSGVHTFPAVLQSS | ID NO: | LQMILNGINN | PGERATL | DEQLKSG |
| | SGFTFNNY | GLYSLSSVVTVPSSSLGTQT | 23) | YKNPKLTRML | SCRASQT | TASVVCL |
| | AMNWVRQA | YICNVNHKPSNTKVDKKVEP | | TFKFYMPKKA | VSSNLAW | LNNFYPR |
| | PGKGLEWS | KSCDKTHTCPPCPAPEAAGA | | TELKHLQCLE | YQQKPGQ | EAKVQWK |
| | AISGSGGR | PSVFLFPPKPKDTLMISRTP | | EELKPLEEAL | APRLLIY | VDNALQS |
| | THYADSVK | EVTCVVVDVSHEDPEVKFNW | | NLAPSKNFHL | DAFTRAT | GNSQESV |
| | GRFTISRD | YVDGVEVHNAKTKPREEQYN | | RPRDLISDIN | GIPARFS | TEQDSKD |
| | NSKNTLYL | STYRVVSVLTVLHQDWLNGK | | VIVLELKGSE | GSGSGTE | STYSLSS |
| | QMNSLRAE | EYKCKVSNKALPAPIEKTIS | | TTFMCEYADE | FTLTISS | TLTLSKA |
| | DTAVYYCA | KAKGQPREPQVYTLPPSREE | | TATIVEFINR | LQSEDFA | DYEKHKV |
| | RERLDINS | MTKNQVSLTCLVKGFYPSDI | | WITFSQSIIS | VYYCQQY | YACEVTH |
| | YFDLWGQG | AVEWESNGQPENNYKTTPPV | | TLT (SEQ | GTWPLTF | QGLSSPV |
| | TLVTVSS | LDSDGSFFLYSKLTVDKSRW | | ID NO: 41) | GQGTKVE | TKSFNRG |
| | (SEQ ID | QQGNVFSCSVMHEALHNHYT | | | IK (SEQ | EC (SEQ |
| | NO: 730) | QKSLSLSPG (SEQ ID | | | ID NO: | ID NO: |
| | | NO: 44) | | | 731) | 45) |
| MIAB | EVQLLESG | ASTKGPSVFPLAPSSKSTSG | GGGGS | APTSSSTKKT | EIVMTQS | RTVAAPS |
| 48 | GGLVQPGG | GTAALGCLVKDYFPEPVTVS | (SEQ | QLQLEHLLLD | PATLSVS | VFIFPPS |
| | SLRLSCAA | WNSGALTSGVHTFPAVLQSS | ID NO: | LQMILNGINN | PGERATL | DEQLKSG |
| | SGFTFDDY | GLYSLSSVVTVPSSSLGTQT | 23) | YKNPKLTRML | SCRASQS | TASVVCL |
| | AMHWVRQA | YICNVNHKPSNTKVDKKVEP | | TFKFYMPKKA | VYSNLAW | LNNFYPR |
| | PGKGLEWV | KSCDKTHTCPPCPAPEAAGA | | TELKHLQCLE | YQQKPGQ | EAKVQWK |
| | ASITSSSA | PSVFLFPPKPKDTLMISRTP | | EELKPLEEAL | APRLLIY | VDNALQS |
| | FIDYADSV | EVTCVVVDVSHEDPEVKFNW | | NLAPSKNFHL | GASTTAT | GNSQESV |
| | KGRFTISR | YVDGVEVHNAKTKPREEQYN | | RPRDLISDIN | GIPARFS | TEQDSKD |
| | DNSKNTLY | STYRVVSVLTVLHQDWLNGK | | VIVLELKGSE | GSGSGTE | STYSLSS |
| | LQMNSLRA | EYKCKVSNKALPAPIEKTIS | | TTFMCEYADE | FTLTISS | TLTLSKA |
| | EDTAVYYC | KAKGQPREPQVYTLPPSREE | | TATIVEFINR | LQSEDFA | DYEKHKV |
| | ARERVDWL | MTKNQVSLTCLVKGFYPSDI | | WITFSQSIIS | VYYCQQY | YACEVTH |
| | SYFDLWGQ | AVEWESNGQPENNYKTTPPV | | TLT (SEQ | HNWPPTF | QGLSSPV |
| | GTLVTVSS | LDSDGSFFLYSKLTVDKSRW | | ID NO: 41) | GQGTKVE | TKSFNRG |
| | (SEQ ID | QQGNVFSCSVMHEALHNHYT | | | IK (SEQ | EC (SEQ |
| | NO: 732) | QKSLSLSPG (SEQ ID | | | ID NO: | ID NO: |
| | | NO: 44) | | | 733) | 45) |
| MIAB | EVQLLESG | ASTKGPSVFPLAPSSKSTSG | GGGGS | APTSSSTKKT | EIVMTQS | RTVAAPS |
| 49 | GGLVQPGG | GTAALGCLVKDYFPEPVTVS | (SEQ | QLQLEHLLLD | PATLSVS | VFIFPPS |
| | SLRLSCAA | WNSGALTSGVHTFPAVLQSS | ID NO: | LQMILNGINN | PGERATL | DEQLKSG |
| | SGLTFSSY | GLYSLSSVVTVPSSSLGTQT | 23) | YKNPKLTRML | SCRASQG | TASVVCL |
| | AMNWVRQA | YICNVNHKPSNTKVDKKVEP | | TFKFYMPKKA | ISNSYLA | LNNFYPR |
| | PGKGLEWS | KSCDKTHTCPPCPAPEAAGA | | TELKHLQCLE | WYQQKPG | EAKVQWK |
| | AISGTGGS | PSVFLFPPKPKDTLMISRTP | | EELKPLEEAL | QAPRLLI | VDNALQS |
| | TYYADSVK | EVTCVVVDVSHEDPEVKFNW | | NLAPSKNFHL | YYASTRA | GNSQESV |
| | GRFTISRD | YVDGVEVHNAKTKPREEQYN | | RPRDLISDIN | TGIPARF | TEQDSKD |
| | NSKNTLYL | STYRVVSVLTVLHQDWLNGK | | VIVLELKGSE | SGSGSGT | STYSLSS |
| | QMNSLRAE | EYKCKVSNKALPAPIEKTIS | | TTFMCEYADE | EFTLTIS | TLTLSKA |
| | DTAVYYCA | KAKGQPREPQVYTLPPSREE | | TATIVEFINR | SLQSEDF | DYEKHKV |
| | RERVDWNN | MTKNQVSLTCLVKGFYPSDI | | WITFSQSIIS | AVYYCQQ | YACEVTH |
| | YFDLWGQG | AVEWESNGQPENNYKTTPPV | | TLT (SEQ | YSDWPPT | QGLSSPV |
| | TLVTVSS | LDSDGSFFLYSKLTVDKSRW | | ID NO: 41) | FGQGTKV | TKSFNRG |
| | (SEQ ID | QQGNVFSCSVMHEALHNHYT | | | EIK | EC (SEQ |
| | NO: 734) | QKSLSLSPG (SEQ ID | | | (SEQ ID | ID NO: |
| | | NO: 44) | | | NO: | 45) |
| | | | | | 735) | |
| MIAB | EVQLLESG | ASTKGPSVFPLAPSSKSTSG | GGGGS | APTSSSTKKT | EIVMTQS | RTVAAPS |
| 50 | GGLVQPGG | GTAALGCLVKDYFPEPVTVS | (SEQ | QLQLEHLLLD | PATLSVS | VFIFPPS |
| | SLRLSCAA | WNSGALTSGVHTFPAVLQSS | ID NO: | LQMILNGINN | PGERATL | DEQLKSG |
| | SGFTFTTY | GLYSLSSVVTVPSSSLGTQT | 23) | YKNPKLTRML | SCRASQS | TASVVCL |
| | ALSWVRQA | YICNVNHKPSNTKVDKKVEP | | TFKFYMPKKA | VGTDLAW | LNNFYPR |
| | PGKGLEWA | KSCDKTHTCPPCPAPEAAGA | | TELKHLQCLE | YQQKPGQ | EAKVQWK |
| | AISGSGSN | PSVFLFPPKPKDTLMISRTP | | EELKPLEEAL | APRLLIY | VDNALQS |
| | TYYADSVK | EVTCVVVDVSHEDPEVKFNW | | NLAPSKNFHL | GASIRAI | GNSQESV |
| | GRFTISRD | YVDGVEVHNAKTKPREEQYN | | RPRDLISDIN | GIPARFS | TEQDSKD |
| | NSKNTLYL | STYRVVSVLTVLHQDWLNGK | | VIVLELKGSE | GSGSGTE | STYSLSS |
| | QMNSLRAE | EYKCKVSNKALPAPIEKTIS | | TTFMCEYADE | FTLTISS | TLTLSKA |
| | DTAVYYCA | KAKGQPREPQVYTLPPSREE | | TATIVEFINR | LQSEDFA | DYEKHKV |
| | RERVDWNV | MTKNQVSLTCLVKGFYPSDI | | WITFSQSIIS | VYYCQQY | YACEVTH |
| | YFDLWGQG | AVEWESNGQPENNYKTTPPV | | TLT (SEQ | YKWPETF | QGLSSPV |
| | TLVTVSS | LDSDGSFFLYSKLTVDKSRW | | ID NO: 41) | GQGTKVE | TKSFNRG |
| | (SEQ ID | QQGNVFSCSVMHEALHNHYT | | | IK (SEQ | EC (SEQ |
| | NO: 736) | QKSLSLSPG (SEQ ID | | | ID NO: | ID NO: |
| | | NO: 44) | | | 737) | 45) |
| MIAB | EVQLLESG | ASTKGPSVFPLAPSSKSTSG | GGGGS | APTSSSTKKT | EIVMTQS | RTVAAPS |
| 51 | GGLVQPGG | GTAALGCLVKDYFPEPVTVS | (SEQ | QLQLEHLLLD | PATLSVS | VFIFPPS |
| | SLRLSCAA | WNSGALTSGVHTFPAVLQSS | ID NO: | LQMILNGINN | PGERATL | DEQLKSG |
| | SGLTFSNY | GLYSLSSVVTVPSSSLGTQT | 23) | YKNPKLTRML | SCRASQS | TASVVCL |
| | AMAWVRQA | YICNVNHKPSNTKVDKKVEP | | TFKFYMPKKA | VSSNLAW | LNNFYPR |
| | PGKGLEWA | KSCDKTHTCPPCPAPEAAGA | | TELKHLQCLE | YQQKPGQ | EAKVQWK |
| | AISSSSGG | PSVFLFPPKPKDTLMISRTP | | EELKPLEEAL | APRLLIY | VDNALQS |
| | TFYADSVK | EVTCVVVDVSHEDPEVKFNW | | NLAPSKNFHL | DVSIRAT | GNSQESV |
| | GRFTISRD | YVDGVEVHNAKTKPREEQYN | | RPRDLISDIN | GIPARFS | TEQDSKD |
| | NSKNTLYL | STYRVVSVLTVLHQDWLNGK | | VIVLELKGSE | GSGSGTE | STYSLSS |
| | QMNSLRAE | EYKCKVSNKALPAPIEKTIS | | TTFMCEYADE | FTLTISS | TLTLSKA |
| | DTAVYYCA | KAKGQPREPQVYTLPPSREE | | TATIVEFINR | LQSEDFA | DYEKHKV |
| | REHVDWNS | MTKNQVSLTCLVKGFYPSDI | | WITFSQSIIS | VYYCQQY | YACEVTH |
| | YFDLWGQG | AVEWESNGQPENNYKTTPPV | | TLT (SEQ | YVWPDTF | QGLSSPV |
| | TLVTVSS | LDSDGSFFLYSKLTVDKSRW | | ID NO: 41) | GQGTKVE | TKSFNRG |
| | (SEQ ID | QQGNVFSCSVMHEALHNHYT | | | IK (SEQ | EC (SEQ |
| | NO: 738) | QKSLSLSPG (SEQ ID | | | ID NO: | ID NO: |
| | | NO: 44) | | | 739) | 45) |
| MIAB | EVQLLESG | ASTKGPSVFPLAPSSKSTSG | GGGGS | APTSSSTKKT | EIVMTQS | RTVAAPS |
| 52 | GGLVQPGG | GTAALGCLVKDYFPEPVTVS | (SEQ | QLQLEHLLLD | PATLSVS | VFIFPPS |
| | SLRLSCAA | WNSGALTSGVHTFPAVLQSS | ID NO: | LQMILNGINN | PGERATL | DEQLKSG |
| | SGFAFSNH | GLYSLSSVVTVPSSSLGTQT | 23) | YKNPKLTRML | SCRASQS | TASVVCL |
| | AMNWVRQA | YICNVNHKPSNTKVDKKVEP | | TFKFYMPKKA | VSTNFAW | LNNFYPR |
| | PGKGLEWS | KSCDKTHTCPPCPAPEAAGA | | TELKHLQCLE | YQQKPGQ | EAKVQWK |
| | AISSSGGS | PSVFLFPPKPKDTLMISRTP | | EELKPLEEAL | APRLLIY | VDNALQS |
| | IDYADSVK | EVTCVVVDVSHEDPEVKFNW | | NLAPSKNFHL | GASSRAT | GNSQESV |
| | GRFTISRD | YVDGVEVHNAKTKPREEQYN | | RPRDLISDIN | GIPARFS | TEQDSKD |
| | NSKNTLYL | STYRVVSVLTVLHQDWLNGK | | VIVLELKGSE | GSGSGTE | STYSLSS |
| | QMNSLRAE | EYKCKVSNKALPAPIEKTIS | | TTFMCEYADE | FTLTISS | TLTLSKA |
| | DTAVYYCA | KAKGQPREPQVYTLPPSREE | | TATIVEFINR | LQSEDFA | DYEKHKV |
| | RERVIWNS | MTKNQVSLTCLVKGFYPSDI | | WITFSQSIIS | VYYCQQY | YACEVTH |
| | YFDLWGQG | AVEWESNGQPENNYKTTPPV | | TLT (SEQ | YKWPPLF | QGLSSPV |
| | TLVTVSS | LDSDGSFFLYSKLTVDKSRW | | ID NO: 41) | GQGTKVE | TKSFNRG |
| | (SEQ ID | QQGNVFSCSVMHEALHNHYT | | | IK (SEQ | EC (SEQ |
| | NO: 740) | QKSLSLSPG (SEQ ID | | | ID NO: | ID NO: |
| | | NO: 44) | | | 741) | 45) |
| MIAB | EVQLLESG | ASTKGPSVFPLAPSSKSTSG | GGGGS | APTSSSTKKT | EIVMTQS | RTVAAPS |
| 53 | GGLVQPGG | GTAALGCLVKDYFPEPVTVS | (SEQ | QLQLEHLLLD | PATLSVS | VFIFPPS |
| | SLRLSCAA | WNSGALTSGVHTFPAVLQSS | ID NO: | LQMILNGINN | PGERATL | DEQLKSG |
| | SGFTFTNY | GLYSLSSVVTVPSSSLGTQT | 23) | YKNPKLTRML | SCRASQS | TASVVCL |
| | AMTWVKQA | YICNVNHKPSNTKVDKKVEP | | TFKFYMPKKA | VSRNLAW | LNNFYPR |
| | PGKGLEWS | KSCDKTHTCPPCPAPEAAGA | | TELKHLQCLE | YQQKPGQ | EAKVQWK |
| | SITGSGGN | PSVFLFPPKPKDTLMISRTP | | EELKPLEEAL | APRLLIY | VDNALQS |
| | TDYADSVK | EVTCVVVDVSHEDPEVKFNW | | NLAPSKNFHL | GASSRVT | GNSQESV |
| | GRFTISRD | YVDGVEVHNAKTKPREEQYN | | RPRDLISDIN | GIPARFS | TEQDSKD |
| | NSKNTLYL | STYRVVSVLTVLHQDWLNGK | | VIVLELKGSE | GSGSGTE | STYSLSS |
| | QMNSLRAE | EYKCKVSNKALPAPIEKTIS | | TTFMCEYADE | FTLTISS | TLTLSKA |
| | DTAVYYCA | KAKGQPREPQVYTLPPSREE | | TATIVEFINR | LQSEDFA | DYEKHKV |
| | RERDDWNS | MTKNQVSLTCLVKGFYPSDI | | WITFSQSIIS | VYYCQQY | YACEVTH |
| | YFDLWGQG | AVEWESNGQPENNYKTTPPV | | TLT (SEQ | KTLPHTF | QGLSSPV |
| | TLVTVSS | LDSDGSFFLYSKLTVDKSRW | | ID NO: 41) | GQGTKVE | TKSFNRG |
| | (SEQ ID | QQGNVFSCSVMHEALHNHYT | | | IK (SEQ | EC (SEQ |
| | NO: 742) | QKSLSLSPG (SEQ ID | | | ID NO: | ID NO: |
| | | NO: 44) | | | 743) | 45) |
| MIAB | EVQLLESG | ASTKGPSVFPLAPSSKSTSG | GGGGS | APTSSSTKKT | EIVMTQS | RTVAAPS |
| 54 | GGLVQPGG | GTAALGCLVKDYFPEPVTVS | (SEQ | QLQLEHLLLD | PATLSVS | VFIFPPS |
| | SLRLSCAA | WNSGALTSGVHTFPAVLQSS | ID NO: | LQMILNGINN | PGERATL | DEQLKSG |
| | SGFTFTSY | GLYSLSSVVTVPSSSLGTQT | 23) | YKNPKLTRML | SCRASQS | TASVVCL |
| | AMNWVRQA | YICNVNHKPSNTKVDKKVEP | | TFKFYMPKKA | VGTNLAW | LNNFYPR |
| | PGKGLEWS | KSCDKTHTCPPCPAPEAAGA | | TELKHLQCLE | YQQKPGQ | EAKVQWK |
| | AISGSGGS | PSVFLFPPKPKDTLMISRTP | | EELKPLEEAL | APRLLIY | VDNALQS |
| | TDYADSVK | EVTCVVVDVSHEDPEVKFNW | | NLAPSKNFHL | GASTRAT | GNSQESV |
| | GRFTISRD | YVDGVEVHNAKTKPREEQYN | | RPRDLISDIN | GIPARFS | TEQDSKD |
| | NSKNTLYL | STYRVVSVLTVLHQDWLNGK | | VIVLELKGSE | GSGSGTE | STYSLSS |
| | QMNSLRAE | EYKCKVSNKALPAPIEKTIS | | TTFMCEYADE | FTLTISS | TLTLSKA |
| | DTAVYYFA | KAKGQPREPQVYTLPPSREE | | TATIVEFINR | LQSEDFA | DYEKHKV |
| | RERVDWNS | MTKNQVSLTCLVKGFYPSDI | | WITFSQSIIS | VYYCQQY | YACEVTH |
| | YFDLWGQG | AVEWESNGQPENNYKTTPPV | | TLT (SEQ | YDIPETF | QGLSSPV |
| | TLVTVSS | LDSDGSFFLYSKLTVDKSRW | | ID NO: 41) | GQGTKVE | TKSFNRG |
| | (SEQ ID | QQGNVFSCSVMHEALHNHYT | | | IK (SEQ | EC (SEQ |
| | NO: 744) | QKSLSLSPG (SEQ ID | | | ID NO: | ID NO: |
| | | NO: 44) | | | 745) | 45) |
| MIAB | EVQLLESG | ASTKGPSVFPLAPSSKSTSG | GGGGS | APTSSSTKKT | EIVMTQS | RTVAAPS |
| 55 | GGLVQPGG | GTAALGCLVKDYFPEPVTVS | (SEQ | QLQLEHLLLD | PATLSVS | VFIFPPS |
| | SLRLSCAA | WNSGALTSGVHTFPAVLQSS | ID NO: | LQMILNGINN | PGERATL | DEQLKSG |
| | SGFAFSTY | GLYSLSSVVTVPSSSLGTQT | 23) | YKNPKLTRML | SCRASQS | TASVVCL |
| | AMSWVRQA | YICNVNHKPSNTKVDKKVEP | | TFKFYMPKKA | VSSYLAW | LNNFYPR |
| | PGKGLEWS | KSCDKTHTCPPCPAPEAAGA | | TELKHLQCLE | YQQKPGQ | EAKVQWK |
| | AISGSGGS | PSVFLFPPKPKDTLMISRTP | | EELKPLEEAL | APRLLIY | VDNALQS |
| | TYHADSVK | EVTCVVVDVSHEDPEVKFNW | | NLAPSKNFHL | GASTWAT | GNSQESV |
| | GRFTISRD | YVDGVEVHNAKTKPREEQYN | | RPRDLISDIN | GIPARFS | TEQDSKD |
| | NSKNTLYL | STYRVVSVLTVLHQDWLNGK | | VIVLELKGSE | GSGSGTE | STYSLSS |
| | QMNSLRAE | EYKCKVSNKALPAPIEKTIS | | TTFMCEYADE | FTLTISS | TLTLSKA |
| | DTAVYYCA | KAKGQPREPQVYTLPPSREE | | TATIVEFINR | LQSEDFA | DYEKHKV |
| | RERVDWNS | MTKNQVSLTCLVKGFYPSDI | | WITFSQSIIS | VYYCQQY | YACEVTH |
| | YNDLWGQG | AVEWESNGQPENNYKTTPPV | | TLT (SEQ | TTWPRTF | QGLSSPV |
| | TLVTVSS | LDSDGSFFLYSKLTVDKSRW | | ID NO: 41) | GQGTKVE | TKSFNRG |
| | (SEQ ID | QQGNVFSCSVMHEALHNHYT | | | IK (SEQ | EC (SEQ |
| | NO: 746) | QKSLSLSPG (SEQ ID | | | ID NO: | ID NO: |
| | | NO: 44) | | | 747) | 45) |
| MIAB | EVQLLESG | ASTKGPSVFPLAPSSKSTSG | GGGGS | APTSSSTKKT | EIVMTQS | RTVAAPS |
| 56 | GGLVQPGG | GTAALGCLVKDYFPEPVTVS | (SEQ | QLQLEHLLLD | PATLSVS | VFIFPPS |
| | SLRLSCAA | WNSGALTSGVHTFPAVLQSS | ID NO: | LQMILNGINN | PGERATL | DEQLKSG |
| | SGFTFSNY | GLYSLSSVVTVPSSSLGTQT | 23) | YKNPKLTRML | SCRASQT | TASVVCL |
| | AMDWVRQA | YICNVNHKPSNTKVDKKVEP | | TFKFYMPKKA | VGSNLAW | LNNFYPR |
| | PGKGLEWS | KSCDKTHTCPPCPAPEAAGA | | TELKHLQCLE | YQQKPGQ | EAKVQWK |
| | GIGGSGGS | PSVFLFPPKPKDTLMISRTP | | EELKPLEEAL | APRLLIY | VDNALQS |
| | TYYADSVK | EVTCVVVDVSHEDPEVKFNW | | NLAPSKNFHL | AASNRAT | GNSQESV |
| | GRFTISRD | YVDGVEVHNAKTKPREEQYN | | RPRDLISDIN | GIPARFS | TEQDSKD |
| | NSKNTLYL | STYRVVSVLTVLHQDWLNGK | | VIVLELKGSE | GSGSGTE | STYSLSS |
| | QMNSLRAE | EYKCKVSNKALPAPIEKTIS | | TTFMCEYADE | FTLTISS | TLTLSKA |
| | DTAVYYCA | KAKGQPREPQVYTLPPSREE | | TATIVEFINR | LQSEDFA | DYEKHKV |
| | RERVDWNS | MTKNQVSLTCLVKGFYPSDI | | WITFSQSIIS | VYYCQQY | YACEVTH |
| | YFYLWGQG | AVEWESNGQPENNYKTTPPV | | TLT (SEQ | KIWPPTF | QGLSSPV |
| | TLVTVSS | LDSDGSFFLYSKLTVDKSRW | | ID NO: 41) | GQGTKVE | TKSFNRG |
| | (SEQ ID | QQGNVFSCSVMHEALHNHYT | | | IK (SEQ | EC (SEQ |
| | NO: 748) | QKSLSLSPG (SEQ ID | | | ID NO: | ID NO: |
| | | NO: 44) | | | 749) | 45) |
| MIAB | EVQLLESG | ASTKGPSVFPLAPSSKSTSG | GGGGS | APTSSSTKKT | EIVMTQS | RTVAAPS |
| 57 | GGLVQPGG | GTAALGCLVKDYFPEPVTVS | (SEQ | QLQLEHLLLD | PATLSVS | VFIFPPS |
| | SLRLSCAA | WNSGALTSGVHTFPAVLQSS | ID NO: | LQMILNGINN | PGERATL | DEQLKSG |
| | SGFTFSNF | GLYSLSSVVTVPSSSLGTQT | 23) | YKNPKLTRML | SCRASQS | TASVVCL |
| | AMNWVRQA | YICNVNHKPSNTKVDKKVEP | | TFKFYMPKKA | VTSKLAW | LNNFYPR |
| | PGKGLEWS | KSCDKTHTCPPCPAPEAAGA | | TELKHLQCLE | YQQKPGQ | EAKVQWK |
| | VITGSGGS | PSVFLFPPKPKDTLMISRTP | | EELKPLEEAL | APRLLIY | VDNALQS |
| | TYYADSVK | EVTCVVVDVSHEDPEVKFNW | | NLAPSKNFHL | SASTRAA | GNSQESV |
| | GRFTISRD | YVDGVEVHNAKTKPREEQYN | | RPRDLISDIN | GIPARFS | TEQDSKD |
| | NSKNTLYL | STYRVVSVLTVLHQDWLNGK | | VIVLELKGSE | GSGSGTE | STYSLSS |
| | QMNSLRAE | EYKCKVSNKALPAPIEKTIS | | TTFMCEYADE | FTLTISS | TLTLSKA |
| | DTAVYYCA | KAKGQPREPQVYTLPPSREE | | TATIVEFINR | LQSEDFA | DYEKHKV |
| | REMVDWNS | MTKNQVSLTCLVKGFYPSDI | | WITFSQSIIS | VYYCQQY | YACEVTH |
| | YFDLWGQG | AVEWESNGQPENNYKTTPPV | | TLT (SEQ | SHWPPTF | QGLSSPV |
| | TLVTVSS | LDSDGSFFLYSKLTVDKSRW | | ID NO: 41) | GQGTKVE | TKSFNRG |
| | (SEQ ID | QQGNVFSCSVMHEALHNHYT | | | IK (SEQ | EC (SEQ |
| | NO: 750) | QKSLSLSPG (SEQ ID | | | ID NO: | ID NO: |
| | | NO: 44) | | | 751) | 45) |
| MIAB | EVQLLESG | ASTKGPSVFPLAPSSKSTSG | GGGGS | APTSSSTKKT | EIVMTQS | RTVAAPS |
| 58 | GGLVQPGG | GTAALGCLVKDYFPEPVTVS | (SEQ | QLQLEHLLLD | PATLSVS | VFIFPPS |
| | SLRLSCAA | WNSGALTSGVHTFPAVLQSS | ID NO: | LQMILNGINN | PGERATL | DEQLKSG |
| | SGFTFSNY | GLYSLSSVVTVPSSSLGTQT | 23) | YKNPKLTRML | SCRASQS | TASVVCL |
| | AMHWVRQA | YICNVNHKPSNTKVDKKVEP | | TFKFYMPKKA | VKSNLAW | LNNFYPR |
| | PGKGLEWS | KSCDKTHTCPPCPAPEAAGA | | TELKHLQCLE | YQQKPGQ | EAKVQWK |
| | AISTSGGS | PSVFLFPPKPKDTLMISRTP | | EELKPLEEAL | APRLLIY | VDNALQS |
| | TYYADSVK | EVTCVVVDVSHEDPEVKFNW | | NLAPSKNFHL | AASSRAT | GNSQESV |
| | GRFTISRD | YVDGVEVHNAKTKPREEQYN | | RPRDLISDIN | GIPARFS | TEQDSKD |
| | NSKNTLYL | STYRVVSVLTVLHQDWLNGK | | VIVLELKGSE | GSGSGTE | STYSLSS |
| | QMNSLRAE | EYKCKVSNKALPAPIEKTIS | | TTFMCEYADE | FTLTISS | TLTLSKA |
| | DTAVYYCA | KAKGQPREPQVYTLPPSREE | | TATIVEFINR | LQSEDFA | DYEKHKV |
| | LERADWNS | MTKNQVSLTCLVKGFYPSDI | | WITFSQSIIS | VYYCQQY | YACEVTH |
| | YFDLWGQG | AVEWESNGQPENNYKTTPPV | | TLT (SEQ | DTWPLTF | QGLSSPV |
| | TLVTVSS | LDSDGSFFLYSKLTVDKSRW | | ID NO: 41) | GQGTKVE | TKSFNRG |
| | (SEQ ID | QQGNVFSCSVMHEALHNHYT | | | IK (SEQ | EC (SEQ |
| | NO: 752) | QKSLSLSPG (SEQ ID | | | ID NO: | ID NO: |
| | | NO: 44) | | | 753) | 45) |
| MIAB | EVQLLESG | ASTKGPSVFPLAPSSKSTSG | GGGGS | APTSSSTKKT | EIVMTQS | RTVAAPS |
| 59 | GGLVQPGG | GTAALGCLVKDYFPEPVTVS | (SEQ | QLQLEHLLLD | PATLSVS | VFIFPPS |
| | SLRLSCAA | WNSGALTSGVHTFPAVLQSS | ID NO: | LQMILNGINN | PGERATL | DEQLKSG |
| | SGFSFSIY | GLYSLSSVVTVPSSSLGTQT | 23) | YKNPKLTRML | SCRASQS | TASVVCL |
| | AMSWVRQA | YICNVNHKPSNTKVDKKVEP | | TFKFYMPKKA | IGSSLAW | LNNFYPR |
| | PGKGLEWS | KSCDKTHTCPPCPAPEAAGA | | TELKHLQCLE | YQQKPGQ | EAKVQWK |
| | AISGSGTS | PSVFLFPPKPKDTLMISRTP | | EELKPLEEAL | APRLLIY | VDNALQS |
| | TYYADSVK | EVTCVVVDVSHEDPEVKFNW | | NLAPSKNFHL | DTSIRAT | GNSQESV |
| | GRFTISRD | YVDGVEVHNAKTKPREEQYN | | RPRDLISDIN | GIPARFS | TEQDSKD |
| | NSKNTLYL | STYRVVSVLTVLHQDWLNGK | | VIVLELKGSE | GSGSGTE | STYSLSS |
| | QMNSLRAE | EYKCKVSNKALPAPIEKTIS | | TTFMCEYADE | FTLTISS | TLTLSKA |
| | DTAVYYCW | KAKGQPREPQVYTLPPSREE | | TATIVEFINR | LQSEDFA | DYEKHKV |
| | RERVDWNS | MTKNQVSLTCLVKGFYPSDI | | WITFSQSIIS | VYYCQQY | YACEVTH |
| | YFDLWGQG | AVEWESNGQPENNYKTTPPV | | TLT (SEQ | SHWPPTF | QGLSSPV |
| | TLVTVSS | LDSDGSFFLYSKLTVDKSRW | | ID NO: 41) | GQGTKVE | TKSFNRG |
| | (SEQ ID | QQGNVFSCSVMHEALHNHYT | | | IK (SEQ | EC (SEQ |
| | NO: 754) | QKSLSLSPG (SEQ ID | | | ID NO: | ID NO: |
| | | NO: 44) | | | 755) | 45) |
| MIAB | EVQLLESG | ASTKGPSVFPLAPSSKSTSG | GGGGS | APTSSSTKKT | EIVMTQS | RTVAAPS |
| 60 | GGLVQPGG | GTAALGCLVKDYFPEPVTVS | (SEQ | QLQLEHLLLD | PATLSVS | VFIFPPS |
| | SLRLSCAA | WNSGALTSGVHTFPAVLQSS | ID NO: | LQMILNGINN | PGERATL | DEQLKSG |
| | SGFSFSGY | GLYSLSSVVTVPSSSLGTQT | 23 | YKNPKLTRML | SCRASQS | TASVVCL |
| | AMSWVRQA | YICNVNHKPSNTKVDKKVEP | | TFKFYMPKKA | ITSNLAW | LNNFYPR |
| | PGKGLEWS | KSCDKTHTCPPCPAPEAAGA | | TELKHLQCLE | YQQKPGQ | EAKVQWK |
| | SITSSGGS | PSVFLFPPKPKDTLMISRTP | | EELKPLEEAL | APRLLIY | VDNALQS |
| | TYYADSVK | EVTCVVVDVSHEDPEVKFNW | | NLAPSKNFHL | GTSSRAT | GNSQESV |
| | GRFTISRD | YVDGVEVHNAKTKPREEQYN | | RPRDLISDIN | GIPARFS | TEQDSKD |
| | NSKNTLYL | STYRVVSVLTVLHQDWLNGK | | VIVLELKGSE | GSGSGTE | STYSLSS |
| | QMNSLRAE | EYKCKVSNKALPAPIEKTIS | | TTFMCEYADE | FTLTISS | TLTLSKA |
| | DTAVYYCA | KAKGQPREPQVYTLPPSREE | | TATIVEFINR | LQSEDFA | DYEKHKV |
| | RERVDWNS | MTKNQVSLTCLVKGFYPSDI | | WITFSQSIIS | VYYCQQY | YACEVTH |
| | YFDRWGQG | AVEWESNGQPENNYKTTPPV | | TLT (SEQ | YIWPLTE | QGLSSPV |
| | TLVTVSS | LDSDGSFFLYSKLTVDKSRW | | ID NO: 41) | GQGTKVE | TKSFNRG |
| | (SEQ ID | QQGNVFSCSVMHEALHNHYT | | | IK (SEQ | EC (SEQ |
| | NO: 756) | QKSLSLSPG (SEQ ID | | | ID NO: | ID NO: |
| | | NO: 44) | | | 757) | 45) |
| MIAB | EVQLLESG | ASTKGPSVFPLAPSSKSTSG | GGGGS | APTSSSTKKT | EIVMTQS | RTVAAPS |
| 61 | GGLVQPGG | GTAALGCLVKDYFPEPVTVS | (SEQ | QLQLEHLLLD | PATLSVS | VFIFPPS |
| | SLRLSCAA | WNSGALTSGVHTFPAVLQSS | ID NO: | LQMILNGINN | PGERATL | DEQLKSG |
| | SGFTFSRY | GLYSLSSVVTVPSSSLGTQT | 23) | YKNPKLTRML | SCRASQS | TASVVCL |
| | GMSWVRQA | YICNVNHKPSNTKVDKKVEP | | TFKFYMPKKA | ISDNLAW | LNNFYPR |
| | PGKGLEWS | KSCDKTHTCPPCPAPEAAGA | | TELKHLQCLE | YQQKPGQ | EAKVQWK |
| | AISGTGGS | PSVFLFPPKPKDTLMISRTP | | EELKPLEEAL | APRLLIY | VDNALQS |
| | TYYADSVK | EVTCVVVDVSHEDPEVKFNW | | NLAPSKNFHL | DASTRAP | GNSQESV |
| | GRFTISRD | YVDGVEVHNAKTKPREEQYN | | RPRDLISDIN | GIPARFS | TEQDSKD |
| | NSKNTLYL | STYRVVSVLTVLHQDWLNGK | | VIVLELKGSE | GSGSGTE | STYSLSS |
| | QMNSLRAE | EYKCKVSNKALPAPIEKTIS | | TTFMCEYADE | FTLTISS | TLTLSKA |
| | DTAVYYHA | KAKGQPREPQVYTLPPSREE | | TATIVEFINR | LQSEDFA | DYEKHKV |
| | RERVDWNS | MTKNQVSLTCLVKGFYPSDI | | WITFSQSIIS | VYYCQQY | YACEVTH |
| | YFDLWGQG | AVEWESNGQPENNYKTTPPV | | TLT (SEQ | DIWPPTF | QGLSSPV |
| | TLVTVSS | LDSDGSFFLYSKLTVDKSRW | | ID NO: 41) | GQGTKVE | TKSFNRG |
| | (SEQ ID | QQGNVFSCSVMHEALHNHYT | | | IK (SEQ | EC (SEQ |
| | NO: 758) | QKSLSLSPG (SEQ ID | | | ID NO: | ID NO: |
| | | NO: 44) | | | 759) | 45) |
| MIAB | EVQLLESG | ASTKGPSVFPLAPSSKSTSG | GGGGS | APTSSSTKKT | EIVMTQS | RTVAAPS |
| 62 | GGLVQPGG | GTAALGCLVKDYFPEPVTVS | (SEQ | QLQLEHLLLD | PATLSVS | VFIFPPS |
| | SLRLSCAA | WNSGALTSGVHTFPAVLQSS | ID NO: | LQMILNGINN | PGERATL | DEQLKSG |
| | SGFTFSSF | GLYSLSSVVTVPSSSLGTQT | 23) | YKNPKLTRML | SCRASQS | TASVVCL |
| | ALSWVRQA | YICNVNHKPSNTKVDKKVEP | | TFKFYMPKKA | LSTNLAW | LNNFYPR |
| | PGKGLEWS | KSCDKTHTCPPCPAPEAAGA | | TELKHLQCLE | YQQKPGQ | EAKVQWK |
| | TISGSGVN | PSVFLFPPKPKDTLMISRTP | | EELKPLEEAL | APRLLIY | VDNALQS |
| | TYYADSVK | EVTCVVVDVSHEDPEVKFNW | | NLAPSKNFHL | RASIRAT | GNSQESV |
| | GRFTISRD | YVDGVEVHNAKTKPREEQYN | | RPRDLISDIN | GIPARFS | TEQDSKD |
| | NSKNTLYL | STYRVVSVLTVLHQDWLNGK | | VIVLELKGSE | GSGSGTE | STYSLSS |
| | QMNSLRAE | EYKCKVSNKALPAPIEKTIS | | TTFMCEYADE | FTLTISS | TLTLSKA |
| | DTAVYYCA | KAKGQPREPQVYTLPPSREE | | TATIVEFINR | LQSEDFA | DYEKHKV |
| | RERVDWNS | MTKNQVSLTCLVKGFYPSDI | | WITFSQSIIS | VYYCQQY | YACEVTH |
| | YFDLLGQG | AVEWESNGQPENNYKTTPPV | | TLT (SEQ | DTWPLTF | QGLSSPV |
| | TLVTVSS | LDSDGSFFLYSKLTVDKSRW | | ID NO: 41) | GQGTKVE | TKSFNRG |
| | (SEQ ID | QQGNVFSCSVMHEALHNHYT | | | IK (SEQ | EC (SEQ |
| | NO: 760) | QKSLSLSPG (SEQ ID | | | ID NO: | ID NO: |
| | | NO: 44) | | | 761) | 45) |
| MIAB | EVQLLESG | ASTKGPSVFPLAPSSKSTSG | GGGGS | APTSSSTKKT | EIVMTQS | RTVAAPS |
| 63 | GGLVQPGG | GTAALGCLVKDYFPEPVTVS | (SEQ | QLQLEHLLLD | PATLSVS | VFIFPPS |
| | SLRLSCAA | WNSGALTSGVHTFPAVLQSS | ID NO: | LQMILNGINN | PGERATL | DEQLKSG |
| | SGFAFSNY | GLYSLSSVVTVPSSSLGTQT | 23) | YKNPKLTRML | SCRASQS | TASVVCL |
| | AMSWVRQA | YICNVNHKPSNTKVDKKVEP | | TFKFYMPKKA | VSSDLVW | LNNFYPR |
| | PGKGLEWS | KSCDKTHTCPPCPAPEAAGA | | TELKHLQCLE | YQQKPGQ | EAKVQWK |
| | SISSSGGS | PSVFLFPPKPKDTLMISRTP | | EELKPLEEAL | APRLLIY | VDNALQS |
| | TDYADSVK | EVTCVVVDVSHEDPEVKFNW | | NLAPSKNFHL | GASTTAT | GNSQESV |
| | GRFTISRD | YVDGVEVHNAKTKPREEQYN | | RPRDLISDIN | GIPARFS | TEQDSKD |
| | NSKNTLYL | STYRVVSVLTVLHQDWLNGK | | VIVLELKGSE | GSGSGTE | STYSLSS |
| | QMNSLRAE | EYKCKVSNKALPAPIEKTIS | | TTFMCEYADE | FTLTISS | TLTLSKA |
| | DTAVYYTA | KAKGQPREPQVYTLPPSREE | | TATIVEFINR | LQSEDFA | DYEKHKV |
| | RERVDWNS | MTKNQVSLTCLVKGFYPSDI | | WITFSQSIIS | VYYCQQY | YACEVTH |
| | YFDLWGQG | AVEWESNGQPENNYKTTPPV | | TLT (SEQ | YSWPKTF | QGLSSPV |
| | TLVTVSS | LDSDGSFFLYSKLTVDKSRW | | ID NO: 41) | GQGTKVE | TKSFNRG |
| | (SEQ ID | QQGNVFSCSVMHEALHNHYT | | | IK (SEQ | EC (SEQ |
| | NO: 762) | QKSLSLSPG (SEQ ID | | | ID NO: | ID NO: |
| | | NO: 44) | | | 763) | 45) |
| MIAB | EVQLLESG | ASTKGPSVFPLAPSSKSTSG | GGGGS | APTSSSTKKT | EIVMTQS | RTVAAPS |
| 64 | GGLVQPGG | GTAALGCLVKDYFPEPVTVS | (SEQ | QLQLEHLLLD | PATLSVS | VFIFPPS |
| | SLRLSCAA | WNSGALTSGVHTFPAVLQSS | ID NO: | LQMILNGINN | PGERATL | DEQLKSG |
| | SGFTFSNY | GLYSLSSVVTVPSSSLGTQT | 23) | YKNPKLTRML | SCRASQS | TASVVCL |
| | AMGWVRQA | YICNVNHKPSNTKVDKKVEP | | TFKFYMPKKA | VRSNLVW | LNNFYPR |
| | PGKGLEWC | KSCDKTHTCPPCPAPEAAGA | | TELKHLQCLE | YQQKPGQ | EAKVQWK |
| | AISSSSAT | PSVFLFPPKPKDTLMISRTP | | EELKPLEEAL | APRLLIY | VDNALQS |
| | TNYADSVK | EVTCVVVDVSHEDPEVKFNW | | NLAPSKNFHL | SASIRAT | GNSQESV |
| | GRFTISRD | YVDGVEVHNAKTKPREEQYN | | RPRDLISDIN | GIPARFS | TEQDSKD |
| | NSKNTLYL | STYRVVSVLTVLHQDWLNGK | | VIVLELKGSE | GSGSGTE | STYSLSS |
| | QMNSLRAE | EYKCKVSNKALPAPIEKTIS | | TTFMCEYADE | FTLTISS | TLTLSKA |
| | DTAVYYCA | KAKGQPREPQVYTLPPSREE | | TATIVEFINR | LQSEDFA | DYEKHKV |
| | REHVDWNS | MTKNQVSLTCLVKGFYPSDI | | WITFSQSIIS | VYYCQQY | YACEVTH |
| | YFVLWGQG | AVEWESNGQPENNYKTTPPV | | TLT (SEQ | IRWPPTF | QGLSSPV |
| | TLVTVSS | LDSDGSFFLYSKLTVDKSRW | | ID NO: 41) | GQGTKVE | TKSFNRG |
| | (SEQ ID | QQGNVFSCSVMHEALHNHYT | | | IK (SEQ | EC (SEQ |
| | NO: 764) | QKSLSLSPG (SEQ ID | | | ID NO: | ID NO: |
| | | NO: 44) | | | 765) | 45) |
| MIAB | EVQLLESG | ASTKGPSVFPLAPSSKSTSG | GGGGS | APTSSSTKKT | EIVMTQS | RTVAAPS |
| 65 | GGLVQPGG | GTAALGCLVKDYFPEPVTVS | (SEQ | QLQLEHLLLD | PATLSVS | VFIFPPS |
| | SLRLSCAA | WNSGALTSGVHTFPAVLQSS | ID NO: | LQMILNGINN | PGERATL | DEQLKSG |
| | SGFTFTSY | GLYSLSSVVTVPSSSLGTQT | 23) | YKNPKLTRML | SCRASQS | TASVVCL |
| | TMSWVRQA | YICNVNHKPSNTKVDKKVEP | | TFKFYMPKKA | VSDKLAW | LNNFYPR |
| | PGKGLEWS | KSCDKTHTCPPCPAPEAAGA | | TELKHLQCLE | YQQKPGQ | EAKVQWK |
| | SITSSGGG | PSVFLFPPKPKDTLMISRTP | | EELKPLEEAL | APRLLIY | VDNALQS |
| | TSYADSVK | EVTCVVVDVSHEDPEVKFNW | | NLAPSKNFHL | EASTRAT | GNSQESV |
| | GRFTISRD | YVDGVEVHNAKTKPREEQYN | | RPRDLISDIN | GIPARFS | TEQDSKD |
| | NSKNTLYL | STYRVVSVLTVLHQDWLNGK | | VIVLELKGSE | GSGSGTE | STYSLSS |
| | QMNSLRAE | EYKCKVSNKALPAPIEKTIS | | TTFMCEYADE | FTLTISS | TLTLSKA |
| | DTAVYYCA | KAKGQPREPQVYTLPPSREE | | TATIVEFINR | LQSEDFA | DYEKHKV |
| | RERVDWNK | MTKNQVSLTCLVKGFYPSDI | | WITFSQSIIS | VYYCQQF | YACEVTH |
| | YFDLWGQG | AVEWESNGQPENNYKTTPPV | | TLT (SEQ | YTWPWTF | QGLSSPV |
| | TLVTVSS | LDSDGSFFLYSKLTVDKSRW | | ID NO: 41) | GQGTKVE | TKSFNRG |
| | (SEQ ID | QQGNVFSCSVMHEALHNHYT | | | IK (SEQ | EC (SEQ |
| | NO: 767) | QKSLSLSPG (SEQ ID | | | ID NO: | ID NO: |
| | | NO: 44) | | | 768) | 45) |
| MIAB | EVQLLESG | ASTKGPSVFPLAPSSKSTSG | GGGGS | APTSSSTKKT | EIVMTQS | RTVAAPS |
| 66 | GGLVQPGG | GTAALGCLVKDYFPEPVTVS | (SEQ | QLQLEHLLLD | PATLSVS | VFIFPPS |
| | SLRLSCAA | WNSGALTSGVHTFPAVLQSS | ID NO: | LQMILNGINN | PGERATL | DEQLKSG |
| | SGLTFSSY | GLYSLSSVVTVPSSSLGTQT | 23) | YKNPKLTRML | SCRASQS | TASVVCL |
| | AMNWVRQA | YICNVNHKPSNTKVDKKVEP | | TFKFYMPKKA | GAGNLAW | LNNFYPR |
| | PGKGLEWS | KSCDKTHTCPPCPAPEAAGA | | TELKHLQCLE | YQQKPGQ | EAKVQWK |
| | GISGSGGN | PSVFLFPPKPKDTLMISRTP | | EELKPLEEAL | APRLLIY | VDNALQS |
| | THYADSVK | EVTCVVVDVSHEDPEVKFNW | | NLAPSKNFHL | DGSTRAT | GNSQESV |
| | GRFTISRD | YVDGVEVHNAKTKPREEQYN | | RPRDLISDIN | GIPARFS | TEQDSKD |
| | NSKNTLYI | STYRVVSVLTVLHQDWLNGK | | VIVLELKGSE | GSGSGTE | STYSLSS |
| | QMNSLRAE | EYKCKVSNKALPAPIEKTIS | | TTFMCEYADE | FTLTISS | TLTLSKA |
| | DTAVYYCA | KAKGQPREPQVYTLPPSREE | | TATIVEFINR | LQSEDFA | DYEKHKV |
| | RERVDWNS | MTKNQVSLTCLVKGFYPSDI | | WITFSQSIIS | VYYCQQY | YACEVTH |
| | YFDLEGQG | AVEWESNGQPENNYKTTPPV | | TLT (SEQ | NHWPPTF | QGLSSPV |
| | TLVTVSS | LDSDGSFFLYSKLTVDKSRW | | ID NO: 41) | GQGTKVE | TKSFNRG |
| | (SEQ ID | QQGNVFSCSVMHEALHNHYT | | | IK (SEQ | EC (SEQ |
| | NO: 769) | QKSLSLSPG (SEQ ID | | | ID NO: | ID NO: |
| | | NO: 44) | | | 770) | 45) |
| MIAB | EVQLLESG | ASTKGPSVFPLAPSSKSTSG | GGGGS | APTSSSTKKT | EIVMTQS | RTVAAPS |
| 67 | GGLVQPGG | GTAALGCLVKDYFPEPVTVS | (SEQ | QLQLEHLLLD | PATLSVS | VFIFPPS |
| | SLRLSCAA | WNSGALTSGVHTFPAVLQSS | ID NO: | LQMILNGINN | PGERATL | DEQLKSG |
| | SGFTLSSY | GLYSLSSVVTVPSSSLGTQT | 23) | YKNPKLTRML | SCRASQS | TASVVCL |
| | GMSWVRQA | YICNVNHKPSNTKVDKKVEP | | TFKFYMPKKA | VFSNLAW | LNNFYPR |
| | PGKGLEWS | KSCDKTHTCPPCPAPEAAGA | | TELKHLQCLE | YQQKPGQ | EAKVQWK |
| | GISGSGVN | PSVFLFPPKPKDTLMISRTP | | EELKPLEEAL | APRLLIY | VDNALQS |
| | TYYADSVK | EVTCVVVDVSHEDPEVKFNW | | NLAPSKNFHL | SASTRAT | GNSQESV |
| | GRFTISRD | YVDGVEVHNAKTKPREEQYN | | RPRDLISDIN | GIPARFS | TEQDSKD |
| | NSKNTLYL | STYRVVSVLTVLHQDWLNGK | | VIVLELKGSE | GSGSGTE | STYSLSS |
| | QMNSLRAE | EYKCKVSNKALPAPIEKTIS | | TTFMCEYADE | FTLTISS | TLTLSKA |
| | DTAVYYCA | KAKGQPREPQVYTLPPSREE | | TATIVEFINR | LQSEDFA | DYEKHKV |
| | RERVDWNS | MTKNQVSLTCLVKGFYPSDI | | WITFSQSIIS | VYYCQQY | YACEVTH |
| | YDDLWGQG | AVEWESNGQPENNYKTTPPV | | TLT (SEQ | STWPQTF | QGLSSPV |
| | TLVTVSS | LDSDGSFFLYSKLTVDKSRW | | ID NO: 41) | GQGTKVE | TKSFNRG |
| | (SEQ ID | QQGNVFSCSVMHEALHNHYT | | | IK (SEQ | EC (SEQ |
| | NO: 771) | QKSLSLSPG (SEQ ID | | | ID NO: | ID NO: |
| | | NO: 44) | | | 772) | 45) |
| MIAB | EVQLLESG | ASTKGPSVFPLAPSSKSTSG | GGGGS | APTSSSTKKT | EIVMTQS | RTVAAPS |
| 68 | GGLVQPGG | GTAALGCLVKDYFPEPVTVS | (SEQ | QLQLEHLLLD | PATLSVS | VFIFPPS |
| | SLRLSCAA | WNSGALTSGVHTFPAVLQSS | ID NO: | LQMILNGINN | PGERATL | DEQLKSG |
| | SGFSFSTY | GLYSLSSVVTVPSSSLGTQT | 23) | YKNPKLTRML | SCRASQS | TASVVCL |
| | AMAWVRQA | YICNVNHKPSNTKVDKKVEP | | TFKFYMPKKA | VSNTLAW | LNNFYPR |
| | PGKGLEWA | KSCDKTHTCPPCPAPEAAGA | | TELKHLQCLE | YQQKPGQ | EAKVQWK |
| | SITGSGGL | PSVFLFPPKPKDTLMISRTP | | EELKPLEEAL | APRLLIY | VDNALQS |
| | ISYADSVK | EVTCVVVDVSHEDPEVKFNW | | NLAPSKNFHL | ASSTRAT | GNSQESV |
| | GRFTISRD | YVDGVEVHNAKTKPREEQYN | | RPRDLISDIN | GIPARFS | TEQDSKD |
| | NSKNTLYL | STYRVVSVLTVLHQDWLNGK | | VIVLELKGSE | GSGSGTE | STYSLSS |
| | QMNSLRAE | EYKCKVSNKALPAPIEKTIS | | TTFMCEYADE | FTLTISS | TLTLSKA |
| | DTAVYYCA | KAKGQPREPQVYTLPPSREE | | TATIVEFINR | LQSEDFA | DYEKHKV |
| | RERDDWNS | MTKNQVSLTCLVKGFYPSDI | | WITFSQSIIS | VYYCQQY | YACEVTH |
| | YFDLWGQG | AVEWESNGQPENNYKTTPPV | | TLT (SEQ | TTWPYTF | QGLSSPV |
| | TLVTVSS | LDSDGSFFLYSKLTVDKSRW | | ID NO: 41) | GQGTKVE | TKSFNRG |
| | (SEQ ID | QQGNVFSCSVMHEALHNHYT | | | IK (SEQ | EC (SEQ |
| | NO: 773) | QKSLSLSPG (SEQ ID | | | ID NO: | ID NO: |
| | | NO: 44) | | | 774) | 45) |
| MIAB | EVQLLESG | ASTKGPSVFPLAPSSKSTSG | GGGGS | APTSSSTKKT | EIVMTQS | RTVAAPS |
| 69 | GGLVQPGG | GTAALGCLVKDYFPEPVTVS | (SEQ | QLQLEHLLLD | PATLSVS | VFIFPPS |
| | SLRLSCAA | WNSGALTSGVHTFPAVLQSS | ID NO: | LQMILNGINN | PGERATL | DEQLKSG |
| | SGFTFSTY | GLYSLSSVVTVPSSSLGTQT | 23) | YKNPKLTRML | SCRASQS | TASVVCL |
| | VMTWVRQA | YICNVNHKPSNTKVDKKVEP | | TFKFYMPKKA | VSTYLAW | LNNFYPR |
| | PGKGLEWS | KSCDKTHTCPPCPAPEAAGA | | TELKHLQCLE | YQQKPGQ | EAKVQWK |
| | GISSSGGS | PSVFLFPPKPKDTLMISRTP | | EELKPLEEAL | APRLLIY | VDNALQS |
| | TYYADSVK | EVTCVVVDVSHEDPEVKFNW | | NLAPSKNFHL | GASFRAT | GNSQESV |
| | GRFTISRD | YVDGVEVHNAKTKPREEQYN | | RPRDLISDIN | GIPARFS | TEQDSKD |
| | NSKNTLYL | STYRVVSVLTVLHQDWLNGK | | VIVLELKGSE | GSGSGTE | STYSLSS |
| | QMNSLRAE | EYKCKVSNKALPAPIEKTIS | | TTFMCEYADE | FTLTISS | TLTLSKA |
| | DTAVYYCA | KAKGQPREPQVYTLPPSREE | | TATIVEFINR | LQSEDFA | DYEKHKV |
| | REHVDWNS | MTKNQVSLTCLVKGFYPSDI | | WITFSQSIIS | VYYCQQY | YACEVTH |
| | YFDLWGQG | AVEWESNGQPENNYKTTPPV | | TLT (SEQ | TTWPQTF | QGLSSPV |
| | TLVTVSS | LDSDGSFFLYSKLTVDKSRW | | ID NO: 41) | GQGTKVE | TKSFNRG |
| | (SEQ ID | QQGNVFSCSVMHEALHNHYT | | | IK (SEQ | EC (SEQ |
| | NO: 775) | QKSLSLSPG (SEQ ID | | | ID NO: | ID NO: |
| | | NO: 44) | | | 776) | 45) |
| MIAB | EVQLLESG | ASTKGPSVFPLAPSSKSTSG | GGGGS | APTSSSTKKT | EIVMTQS | RTVAAPS |
| 70 | GGLVQPGG | GTAALGCLVKDYFPEPVTVS | (SEQ | QLQLEHLLLD | PATLSVS | VFIFPPS |
| | SLRLSCAA | WNSGALTSGVHTFPAVLQSS | ID NO: | LQMILNGINN | PGERATL | DEQLKSG |
| | SGFTFSIY | GLYSLSSVVTVPSSSLGTQT | 23) | YKNPKLTRML | SCRTSQS | TASVVCL |
| | AMSWVRQA | YICNVNHKPSNTKVDKKVEP | | TFKFYMPKKA | ISSNLAW | LNNFYPR |
| | PGKGLEWA | KSCDKTHTCPPCPAPEAAGA | | TELKHLQCLE | YQQKPGQ | EAKVQWK |
| | AISSSSGR | PSVFLFPPKPKDTLMISRTP | | EELKPLEEAL | APRLLIY | VDNALQS |
| | TYYADSVK | EVTCVVVDVSHEDPEVKFNW | | NLAPSKNFHL | ASSTRAT | GNSQESV |
| | GRFTISRD | YVDGVEVHNAKTKPREEQYN | | RPRDLISDIN | GIPARFS | TEQDSKD |
| | NSKNTLYL | STYRVVSVLTVLHQDWLNGK | | VIVLELKGSE | GSGSGTE | STYSLSS |
| | QMNSLRAE | EYKCKVSNKALPAPIEKTIS | | TTFMCEYADE | FTLTISS | TLTLSKA |
| | DTAVYYCA | KAKGQPREPQVYTLPPSREE | | TATIVEFINR | LQSEDFA | DYEKHKV |
| | RERVDWNS | MTKNQVSLTCLVKGFYPSDI | | WITFSQSIIS | VYYCQQY | YACEVTH |
| | WFDLWGQG | AVEWESNGQPENNYKTTPPV | | TLT (SEQ | SEWPPTF | QGLSSPV |
| | TLVTVSS | LDSDGSFFLYSKLTVDKSRW | | ID NO: 41) | GQGTKVE | TKSFNRG |
| | (SEQ ID | QQGNVFSCSVMHEALHNHYT | | | IK (SEQ | EC (SEQ |
| | NO: 777) | QKSLSLSPG (SEQ ID | | | ID NO: | ID NO: |
| | | NO: 44) | | | 778) | 45) |
| MIAB | EVQLLESG | ASTKGPSVFPLAPSSKSTSG | GGGGS | APTSSSTKKT | EIVMTQS | RTVAAPS |
| 71 | GGLVQPGG | GTAALGCLVKDYFPEPVTVS | (SEQ | QLQLEHLLLD | PATLSVS | VFIFPPS |
| | SLRLSCAA | WNSGALTSGVHTFPAVLQSS | ID NO: | LQMILNGINN | PGERATL | DEQLKSG |
| | SGFTFSTY | GLYSLSSVVTVPSSSLGTQT | 23) | YKNPKLTRML | SCTASQS | TASVVCL |
| | AMSWVRQA | YICNVNHKPSNTKVDKKVEP | | TFKFYMPKKA | VSSNLAW | LNNFYPR |
| | PGKGLEWS | KSCDKTHTCPPCPAPEAAGA | | TELKHLQCLE | YQQKPGQ | EAKVQWK |
| | AISGSGGS | PSVFLFPPKPKDTLMISRTP | | EELKPLEEAL | APRLLIY | VDNALQS |
| | TSYADSVK | EVTCVVVDVSHEDPEVKFNW | | NLAPSKNFHL | TASIRAT | GNSQESV |
| | GRFTISRD | YVDGVEVHNAKTKPREEQYN | | RPRDLISDIN | GIPARFS | TEQDSKD |
| | NSKNTLYL | STYRVVSVLTVLHQDWLNGK | | VIVLELKGSE | GSGSGTE | STYSLSS |
| | QMNSLRAE | EYKCKVSNKALPAPIEKTIS | | TTFMCEYADE | FTLTISS | TLTLSKA |
| | DTAVYYCA | KAKGQPREPQVYTLPPSREE | | TATIVEFINR | LQSEDFA | DYEKHKV |
| | SERVDWNS | MTKNQVSLTCLVKGFYPSDI | | WITFSQSIIS | VYYCQQY | YACEVTH |
| | YFDLWGQG | AVEWESNGQPENNYKTTPPV | | TLT (SEQ | YSWPKTF | QGLSSPV |
| | TLVTVSS | LDSDGSFFLYSKLTVDKSRW | | ID NO: 41) | GQGTKVE | TKSFNRG |
| | (SEQ ID | QQGNVFSCSVMHEALHNHYT | | | IK (SEQ | EC (SEQ |
| | NO: 779) | QKSLSLSPG (SEQ ID | | | ID NO: | ID NO: |
| | | NO: 44) | | | 780) | 45) |
| MIAB | EVQLLESG | ASTKGPSVFPLAPSSKSTSG | GGGGS | APTSSSTKKT | EIVMTQS | RTVAAPS |
| 72 | GGLVQPGG | GTAALGCLVKDYFPEPVTVS | (SEQ | QLQLEHLLLD | PATLSVS | VFIFPPS |
| | SLRLSCAA | WNSGALTSGVHTFPAVLQSS | ID NO: | LQMILNGINN | PGERATL | DEQLKSG |
| | SGFIFSNY | GLYSLSSVVTVPSSSLGTQT | 23) | YKNPKLTRML | SCRASQS | TASVVCL |
| | GMSWVRQA | YICNVNHKPSNTKVDKKVEP | | TFKFYMPKKA | VRGNLAW | LNNFYPR |
| | PGKGLEWS | KSCDKTHTCPPCPAPEAAGA | | TELKHLQCLE | YQQKPGQ | EAKVQWK |
| | SISGGGGS | PSVFLFPPKPKDTLMISRTP | | EELKPLEEAL | APRLLIY | VDNALQS |
| | TYYADSVK | EVTCVVVDVSHEDPEVKFNW | | NLAPSKNFHL | GASRRAT | GNSQESV |
| | GRFTISRD | YVDGVEVHNAKTKPREEQYN | | RPRDLISDIN | GIPARFS | TEQDSKD |
| | NSKNTLYL | STYRVVSVLTVLHQDWLNGK | | VIVLELKGSE | GSGSGTE | STYSLSS |
| | QMNSLRAE | EYKCKVSNKALPAPIEKTIS | | TTFMCEYADE | FTLTISS | TLTLSKA |
| | DTAVYYCA | KAKGQPREPQVYTLPPSREE | | TATIVEFINR | LQSEDFA | DYEKHKV |
| | RERVTWNS | MTKNQVSLTCLVKGFYPSDI | | WITFSQSIIS | VYYCQQY | YACEVTH |
| | YFDLWGQG | AVEWESNGQPENNYKTTPPV | | TLT (SEQ | YRWPLTF | QGLSSPV |
| | TLVTVSS | LDSDGSFFLYSKLTVDKSRW | | ID NO: 41) | GQGTKVE | TKSFNRG |
| | (SEQ ID | QQGNVFSCSVMHEALHNHYT | | | IK (SEQ | EC (SEQ |
| | NO: 781) | QKSLSLSPG (SEQ ID | | | ID NO: | ID NO: |
| | | NO: 44) | | | 782) | 45) |
| MIAB | EVQLLESG | ASTKGPSVFPLAPSSKSTSG | GGGGS | APTSSSTKKT | EIVMTQS | RTVAAPS |
| 73 | GGLVQPGG | GTAALGCLVKDYFPEPVTVS | (SEQ | QLQLEHLLLD | PATLSVS | VFIFPPS |
| | SLRLSCAA | WNSGALTSGVHTFPAVLQSS | ID NO: | LQMILNGINN | PGERATL | DEQLKSG |
| | SGFAFNNY | GLYSLSSVVTVPSSSLGTQT | 23) | YKNPKLTRML | SCRASQS | TASVVCL |
| | AMSWVRQA | YICNVNHKPSNTKVDKKVEP | | TFKFYMPKKA | VRSSLSW | LNNFYPR |
| | PGKGLEWS | KSCDKTHTCPPCPAPEAAGA | | TELKHLQCLE | YQQKPGQ | EAKVQWK |
| | GISGSGGT | PSVFLFPPKPKDTLMISRTP | | EELKPLEEAL | APRLLIY | VDNALQS |
| | TYYADSVK | EVTCVVVDVSHEDPEVKFNW | | NLAPSKNFHL | TASIRAT | GNSQESV |
| | GRFTISRD | YVDGVEVHNAKTKPREEQYN | | RPRDLISDIN | GIPARFS | TEQDSKD |
| | NSKNTLYL | STYRVVSVLTVLHQDWLNGK | | VIVLELKGSE | GSGSGTE | STYSLSS |
| | QMNSLRAE | EYKCKVSNKALPAPIEKTIS | | TTFMCEYADE | FTLTISS | TLTLSKA |
| | DTAVYYNA | KAKGQPREPQVYTLPPSREE | | TATIVEFINR | LQSEDFA | DYEKHKV |
| | RERVDWNS | MTKNQVSLTCLVKGFYPSDI | | WITFSQSIIS | VYYCQQY | YACEVTH |
| | YFDLWGQG | AVEWESNGQPENNYKTTPPV | | TLT (SEQ | KNYPLTF | QGLSSPV |
| | TLVTVSS | LDSDGSFFLYSKLTVDKSRW | | ID NO: 41) | GQGTKVE | TKSFNRG |
| | (SEQ ID | QQGNVFSCSVMHEALHNHYT | | | IK (SEQ | EC (SEQ |
| | NO: 783) | QKSLSLSPG (SEQ ID | | | ID NO: | ID NO: |
| | | NO: 44) | | | 784) | 45) |
| MIAB | EVQLLESG | ASTKGPSVFPLAPSSKSTSG | GGGGS | APTSSSTKKT | EIVMTQS | RTVAAPS |
| 74 | GGLVQPGG | GTAALGCLVKDYFPEPVTVS | (SEQ | QLQLEHLLLD | PATLSVS | VFIFPPS |
| | SLRLSCAA | WNSGALTSGVHTFPAVLQSS | ID NO: | LQMILNGINN | PGERATL | DEQLKSG |
| | SGFTFNNY | GLYSLSSVVTVPSSSLGTQT | 23) | YKNPKLTRML | SCRASQS | TASVVCL |
| | AMNWVRQA | YICNVNHKPSNTKVDKKVEP | | TFKFYMPKKA | VSSNLAW | LNNFYPR |
| | PGKGLEWS | KSCDKTHTCPPCPAPEAAGA | | TELKHLQCLE | YQQKPGQ | EAKVQWK |
| | AVSGSGAS | PSVFLFPPKPKDTLMISRTP | | EELKPLEEAL | APRLLIY | VDNALQS |
| | TYYADSVK | EVTCVVVDVSHEDPEVKFNW | | NLAPSKNFHL | GSFTRAT | GNSQESV |
| | GRFTISRD | YVDGVEVHNAKTKPREEQYN | | RPRDLISDIN | GIPARFS | TEQDSKD |
| | NSKNTLYL | STYRVVSVLTVLHQDWLNGK | | VIVLELKGSE | GSGSGTE | STYSLSS |
| | QMNSLRAE | EYKCKVSNKALPAPIEKTIS | | TTFMCEYADE | FTLTISS | TLTLSKA |
| | DTAVYYCH | KAKGQPREPQVYTLPPSREE | | TATIVEFINR | LQSEDFA | DYEKHKV |
| | RERVDWNS | MTKNQVSLTCLVKGFYPSDI | | WITFSQSIIS | VYYCQQY | YACEVTH |
| | YFDLWGQG | AVEWESNGQPENNYKTTPPV | | TLT (SEQ | SNWPPLF | QGLSSPV |
| | TLVTVSS | LDSDGSFFLYSKLTVDKSRW | | ID NO: 41) | GQGTKVE | TKSFNRG |
| | (SEQ ID | QQGNVFSCSVMHEALHNHYT | | | IK (SEQ | EC (SEQ |
| | NO: 785) | QKSLSLSPG (SEQ ID | | | ID NO: | ID NO: |
| | | NO: 44) | | | 786) | 45) |
| MIAB | EVQLLESG | ASTKGPSVFPLAPSSKSTSG | GGGGS | APTSSSTKKT | EIVMTQS | RTVAAPS |
| 75 | GGLVQPGG | GTAALGCLVKDYFPEPVTVS | (SEQ | QLQLEHLLLD | PATLSVS | VFIFPPS |
| | SLRLSCAA | WNSGALTSGVHTFPAVLQSS | ID NO: | LQMILNGINN | PGERATL | DEQLKSG |
| | SGFTFGDY | GLYSLSSVVTVPSSSLGTQT | 23) | YKNPKLTRML | SCRASQS | TASVVCL |
| | AMSWVRQA | YICNVNHKPSNTKVDKKVEP | | TFKFYMPKKA | VSNTLAW | LNNFYPR |
| | PGKGLEWA | KSCDKTHTCPPCPAPEAAGA | | TELKHLQCLE | YQQKPGQ | EAKVQWK |
| | TVSSASAL | PSVFLFPPKPKDTLMISRTP | | EELKPLEEAL | APRLLIY | VDNALQS |
| | IYYADSVK | EVTCVVVDVSHEDPEVKFNW | | NLAPSKNFHL | DATTRAT | GNSQESV |
| | GRFTISRD | YVDGVEVHNAKTKPREEQYN | | RPRDLISDIN | GIPARFS | TEQDSKD |
| | NSKNTLYL | STYRVVSVLTVLHQDWLNGK | | VIVLELKGSE | GSGSGTE | STYSLSS |
| | QMNSLRAE | EYKCKVSNKALPAPIEKTIS | | TTFMCEYADE | FTLTISS | TLTLSKA |
| | DTAVYYCK | KAKGQPREPQVYTLPPSREE | | TATIVEFINR | LQSEDFA | DYEKHKV |
| | RERVDWNS | MTKNQVSLTCLVKGFYPSDI | | WITFSQSIIS | VYYCQQY | YACEVTH |
| | YFDLWGQG | AVEWESNGQPENNYKTTPPV | | TLT (SEQ | YDWPITF | QGLSSPV |
| | TLVTVSS | LDSDGSFFLYSKLTVDKSRW | | ID NO: 41) | GQGTKVE | TKSFNRG |
| | (SEQ ID | QQGNVFSCSVMHEALHNHYT | | | IK (SEQ | EC (SEQ |
| | NO: 787) | QKSLSLSPG (SEQ ID | | | ID NO: | ID NO: |
| | | NO: 44) | | | 788) | 45) |
| MIAB | EVQLLESG | ASTKGPSVFPLAPSSKSTSG | GGGGS | APTSSSTKKT | EIVMTQS | RTVAAPS |
| 76 | GGLVQPGG | GTAALGCLVKDYFPEPVTVS | (SEQ | QLQLEHLLLD | PATLSVS | VFIFPPS |
| | SLRLSCAA | WNSGALTSGVHTFPAVLQSS | ID NO: | LQMILNGINN | PGERATL | DEQLKSG |
| | SGFTFSNY | GLYSLSSVVTVPSSSLGTQT | 23) | YKNPKLTRML | SCRASQS | TASVVCL |
| | VMTWVRQA | YICNVNHKPSNTKVDKKVEP | | TFKFYMPKKA | VNDNLAW | LNNFYPR |
| | PGKGLEWS | KSCDKTHTCPPCPAPEAAGA | | TELKHLQCLE | YQQKPGQ | EAKVQWK |
| | GISGSGTN | PSVFLFPPKPKDTLMISRTP | | EELKPLEEAL | APRLLIY | VDNALQS |
| | TYYADSVK | EVTCVVVDVSHEDPEVKFNW | | NLAPSKNFHL | AASTRVT | GNSQESV |
| | GRFTISRD | YVDGVEVHNAKTKPREEQYN | | RPRDLISDIN | GIPARFS | TEQDSKD |
| | NSKNTLYL | STYRVVSVLTVLHQDWLNGK | | VIVLELKGSE | GSGSGTE | STYSLSS |
| | QMNSLRAE | EYKCKVSNKALPAPIEKTIS | | TTFMCEYADE | FTLTISS | TLTLSKA |
| | DTAVYYCA | KAKGQPREPQVYTLPPSREE | | TATIVEFINR | LQSEDFA | DYEKHKV |
| | RERVDWNS | MTKNQVSLTCLVKGFYPSDI | | WITFSQSIIS | VYYCQQY | YACEVTH |
| | QFDLWGQG | AVEWESNGQPENNYKTTPPV | | TLT (SEQ | ERWPPTF | QGLSSPV |
| | TLVTVSS | LDSDGSFFLYSKLTVDKSRW | | ID NO: 41) | GQGTKVE | TKSFNRG |
| | (SEQ ID | QQGNVFSCSVMHEALHNHYT | | | IK (SEQ | EC (SEQ |
| | NO: 789) | QKSLSLSPG (SEQ ID | | | ID NO: | ID NO: |
| | | NO: 44) | | | 790) | 45) |
| MIAB | EVQLLESG | ASTKGPSVFPLAPSSKSTSG | GGGGS | APTSSSTKKT | EIVMTQS | RTVAAPS |
| 77 | GGLVQPGG | GTAALGCLVKDYFPEPVTVS | (SEQ | QLQLEHLLLD | PATLSVS | VFIFPPS |
| | SLRLSCAA | WNSGALTSGVHTFPAVLQSS | ID NO: | LQMILNGINN | PGERATL | DEQLKSG |
| | SGLTFSSY | GLYSLSSVVTVPSSSLGTQT | 23) | YKNPKLTRML | SCRASQS | TASVVCL |
| | AMSWVRQA | YICNVNHKPSNTKVDKKVEP | | TFKFYMPKKA | VSSNVAW | LNNFYPR |
| | PGKGLEWA | KSCDKTHTCPPCPAPEAAGA | | TELKHLQCLE | YQQKPGQ | EAKVQWK |
| | SITGSGSG | PSVFLFPPKPKDTLMISRTP | | EELKPLEEAL | APRLLIY | VDNALQS |
| | TFYADSVK | EVTCVVVDVSHEDPEVKFNW | | NLAPSKNFHL | GGSTRAT | GNSQESV |
| | GRFTISRD | YVDGVEVHNAKTKPREEQYN | | RPRDLISDIN | GIPARFS | TEQDSKD |
| | NSKNTLYL | STYRVVSVLTVLHQDWLNGK | | VIVLELKGSE | GSGSGTE | STYSLSS |
| | QMNSLRAE | EYKCKVSNKALPAPIEKTIS | | TTFMCEYADE | FTLTISS | TLTLSKA |
| | DTAVYYCA | KAKGQPREPQVYTLPPSREE | | TATIVEFINR | LQSEDFA | DYEKHKV |
| | RERVDWNS | MTKNQVSLTCLVKGFYPSDI | | WITFSQSIIS | VYYCQQY | YACEVTH |
| | YFDDWGQG | AVEWESNGQPENNYKTTPPV | | TLT (SEQ | HLWPPTF | QGLSSPV |
| | TLVTVSS | LDSDGSFFLYSKLTVDKSRW | | ID NO: 41) | GQGTKVE | TKSFNRG |
| | (SEQ ID | QQGNVFSCSVMHEALHNHYT | | | IK (SEQ | EC (SEQ |
| | NO: 791) | QKSLSLSPG (SEQ ID | | | ID NO: | ID NO: |
| | | NO: 44) | | | 792) | 45) |
| MIAB | EVQLLESG | ASTKGPSVFPLAPSSKSTSG | GGGGS | APTSSSTKKT | EIVMTQS | RTVAAPS |
| 78 | GGLVQPGG | GTAALGCLVKDYFPEPVTVS | (SEQ | QLQLEHLLLD | PATLSVS | VFIFPPS |
| | SLRLSCAA | WNSGALTSGVHTFPAVLQSS | ID NO: | LQMILNGINN | PGERATL | DEQLKSG |
| | SGFTFSTY | GLYSLSSVVTVPSSSLGTQT | 23) | YKNPKLTRML | SCRASRS | TASVVCL |
| | ATSWVRQA | YICNVNHKPSNTKVDKKVEP | | TFKFYMPKKA | VSTNLAW | LNNFYPR |
| | PGKGLEWS | KSCDKTHTCPPCPAPEAAGA | | TELKHLQCLE | YQQKPGQ | EAKVQWK |
| | AVSGSGAS | PSVFLFPPKPKDTLMISRTP | | EELKPLEEAL | APRLLIY | VDNALQS |
| | TYYADSVK | EVTCVVVDVSHEDPEVKFNW | | NLAPSKNFHL | GTSSRAT | GNSQESV |
| | GRFTISRD | YVDGVEVHNAKTKPREEQYN | | RPRDLISDIN | GIPARFS | TEQDSKD |
| | NSKNTLYL | STYRVVSVLTVLHQDWLNGK | | VIVLELKGSE | GSGSGTE | STYSLSS |
| | QMNSLRAE | EYKCKVSNKALPAPIEKTIS | | TTFMCEYADE | FTLTISS | TLTLSKA |
| | DTAVYYCR | KAKGQPREPQVYTLPPSREE | | TATIVEFINR | LQSEDFA | DYEKHKV |
| | RERVDWNS | MTKNQVSLTCLVKGFYPSDI | | WITFSQSIIS | VYYCQQY | YACEVTH |
| | YFDLWGQG | AVEWESNGQPENNYKTTPPV | | TLT (SEQ | ERWPPTF | QGLSSPV |
| | TLVTVSS | LDSDGSFFLYSKLTVDKSRW | | ID NO: 41) | GQGTKVE | TKSFNRG |
| | (SEQ ID | QQGNVFSCSVMHEALHNHYT | | | IK (SEQ | EC (SEQ |
| | NO: 793) | QKSLSLSPG (SEQ ID | | | ID NO: | ID NO: |
| | | NO: 44) | | | 794) | 45) |
| MIAB | EVQLLESG | ASTKGPSVFPLAPSSKSTSG | GGGGS | APTSSSTKKT | EIVMTQS | RTVAAPS |
| 79 | GGLVQPGG | GTAALGCLVKDYFPEPVTVS | (SEQ | QLQLEHLLLD | PATLSVS | VFIFPPS |
| | SLRLSCAA | WNSGALTSGVHTFPAVLQSS | ID NO: | LQMILNGINN | PGERATL | DEQLKSG |
| | SGFTFSSY | GLYSLSSVVTVPSSSLGTQT | 23) | YKNPKLTRML | SCRASHS | TASVVCL |
| | GMNWVRQA | YICNVNHKPSNTKVDKKVEP | | TFKFYMPKKA | VSSKLAW | LNNFYPR |
| | PGKGLEWS | KSCDKTHTCPPCPAPEAAGA | | TELKHLQCLE | YQQKPGQ | EAKVQWK |
| | GISGSGGN | PSVFLFPPKPKDTLMISRTP | | EELKPLEEAL | APRLLIY | VDNALQS |
| | TFYADSVK | EVTCVVVDVSHEDPEVKFNW | | NLAPSKNFHL | EASTRAT | GNSQESV |
| | GRFTISRD | YVDGVEVHNAKTKPREEQYN | | RPRDLISDIN | GIPARFS | TEQDSKD |
| | NSKNTLYL | STYRVVSVLTVLHQDWLNGK | | VIVLELKGSE | GSGSGTE | STYSLSS |
| | QMNSLRAE | EYKCKVSNKALPAPIEKTIS | | TTFMCEYADE | FTLTISS | TLTLSKA |
| | DTAVYYCA | KAKGQPREPQVYTLPPSREE | | TATIVEFINR | LQSEDFA | DYEKHKV |
| | EERVDWNS | MTKNQVSLTCLVKGFYPSDI | | WITFSQSIIS | VYYCQQY | YACEVTH |
| | YFDLWGQG | AVEWESNGQPENNYKTTPPV | | TLT (SEQ | YHWPRTF | QGLSSPV |
| | TLVTVSS | LDSDGSFFLYSKLTVDKSRW | | ID NO: 41) | GQGTKVE | TKSFNRG |
| | (SEQ ID | QQGNVFSCSVMHEALHNHYT | | | IK (SEQ | EC (SEQ |
| | NO: 795) | QKSLSLSPG (SEQ ID | | | ID NO: | ID NO: |
| | | NO: 44) | | | 796) | 45) |
| MIAB | EVQLLESG | ASTKGPSVFPLAPSSKSTSG | GGGGS | APTSSSTKKT | EIVMTQS | RTVAAPS |
| 80 | GGLVQPGG | GTAALGCLVKDYFPEPVTVS | (SEQ | QLQLEHLLLD | PATLSVS | VFIFPPS |
| | SLRLSCAA | WNSGALTSGVHTFPAVLQSS | ID NO: | LQMILNGINN | PGERATL | DEQLKSG |
| | SGFTFSNY | GLYSLSSVVTVPSSSLGTQT | 23) | YKNPKLTRML | SCRASQS | TASVVCL |
| | VMSWVRQA | YICNVNHKPSNTKVDKKVEP | | TFKFYMPKKA | VRDNLAW | LNNFYPR |
| | PGKGLEWS | KSCDKTHTCPPCPAPEAAGA | | TELKHLQCLE | YQQKPGQ | EAKVQWK |
| | AISGSGRS | PSVFLFPPKPKDTLMISRTP | | EELKPLEEAL | APRLLIY | VDNALQS |
| | TYYADSVK | EVTCVVVDVSHEDPEVKFNW | | NLAPSKNFHL | DASTRVT | GNSQESV |
| | GRFTISRD | YVDGVEVHNAKTKPREEQYN | | RPRDLISDIN | GIPARFS | TEQDSKD |
| | NSKNTLYL | STYRVVSVLTVLHQDWLNGK | | VIVLELKGSE | GSGSGTE | STYSLSS |
| | QMNSLRAE | EYKCKVSNKALPAPIEKTIS | | TTFMCEYADE | FTLTISS | TLTLSKA |
| | DTAVYYCA | KAKGQPREPQVYTLPPSREE | | TATIVEFINR | LQSEDFA | DYEKHKV |
| | RERVDNNS | MTKNQVSLTCLVKGFYPSDI | | WITFSQSIIS | VYYCQQY | YACEVTH |
| | YFDLWGQG | AVEWESNGQPENNYKTTPPV | | TLT (SEQ | NHWPPTF | QGLSSPV |
| | TLVTVSS | LDSDGSFFLYSKLTVDKSRW | | ID NO: 41) | GQGTKVE | TKSFNRG |
| | (SEQ ID | QQGNVFSCSVMHEALHNHYT | | | IK (SEQ | EC (SEQ |
| | NO: 797) | QKSLSLSPG (SEQ ID | | | ID NO: | ID NO: |
| | | NO: 44) | | | 798) | 45) |
| MIAB | EVQLLESG | ASTKGPSVFPLAPSSKSTSG | GGGGS | APTSSSTKKT | EIVMTQS | RTVAAPS |
| 81 | GGLVQPGG | GTAALGCLVKDYFPEPVTVS | (SEQ | QLQLEHLLLD | PATLSVS | VFIFPPS |
| | SLRLSCAA | WNSGALTSGVHTFPAVLQSS | ID NO: | LQMILNGINN | PGERATL | DEQLKSG |
| | SGFTFTTY | GLYSLSSVVTVPSSSLGTQT | 23) | YKNPKLTRML | SCRASQS | TASVVCL |
| | ALSWVRQA | YICNVNHKPSNTKVDKKVEP | | TFKFYMPKKA | VSSYLAW | LNNFYPR |
| | PGKGLEWS | KSCDKTHTCPPCPAPEAAGA | | TELKHLQCLE | YQQKPGQ | EAKVQWK |
| | AISGSGGS | PSVFLFPPKPKDTLMISRTP | | EELKPLEEAL | APRLLIY | VDNALQS |
| | TYSADSVK | EVTCVVVDVSHEDPEVKFNW | | NLAPSKNFHL | RASTRAA | GNSQESV |
| | GRFTISRD | YVDGVEVHNAKTKPREEQYN | | RPRDLISDIN | GIPARFS | TEQDSKD |
| | NSKNTLYL | STYRVVSVLTVLHQDWLNGK | | VIVLELKGSE | GSGSGTE | STYSLSS |
| | QMNSLRAE | EYKCKVSNKALPAPIEKTIS | | TTFMCEYADE | FTLTISS | TLTLSKA |
| | DTAVYYWA | KAKGQPREPQVYTLPPSREE | | TATIVEFINR | LQSEDFA | DYEKHKV |
| | RERVDWNS | MTKNQVSLTCLVKGFYPSDI | | WITFSQSIIS | VYYCQQY | YACEVTH |
| | YFDLWGQG | AVEWESNGQPENNYKTTPPV | | TLT (SEQ | SDWPPTF | QGLSSPV |
| | TLVTVSS | LDSDGSFFLYSKLTVDKSRW | | ID NO: 41) | GQGTKVE | TKSFNRG |
| | (SEQ ID | QQGNVFSCSVMHEALHNHYT | | | IK (SEQ | EC (SEQ |
| | NO: 799) | QKSLSLSPG (SEQ ID | | | ID NO: | ID NO: |
| | | NO: 44) | | | 800) | 45) |
| MIAB | EVQLLESG | ASTKGPSVFPLAPSSKSTSG | GGGGS | APTSSSTKKT | EIVMTQS | RTVAAPS |
| 82 | GGLVQPGG | GTAALGCLVKDYFPEPVTVS | (SEQ | QLQLEHLLLD | PATLSVS | VFIFPPS |
| | SLRLSCAA | WNSGALTSGVHTFPAVLQSS | ID NO: | LQMILNGINN | PGERATL | DEQLKSG |
| | SGFAFSSS | GLYSLSSVVTVPSSSLGTQT | 23) | YKNPKLTRML | SCRASQS | TASVVCL |
| | AMSWVRQA | YICNVNHKPSNTKVDKKVEP | | TFKFYMPKKA | ISTKLAW | LNNFYPR |
| | PGKGLEWS | KSCDKTHTCPPCPAPEAAGA | | TELKHLQCLE | YQQKPGQ | EAKVQWK |
| | ALSGSGGS | PSVFLFPPKPKDTLMISRTP | | EELKPLEEAL | APRLLIY | VDNALQS |
| | TYSADSVK | EVTCVVVDVSHEDPEVKFNW | | NLAPSKNFHL | AASTRAT | GNSQESV |
| | GRFTISRD | YVDGVEVHNAKTKPREEQYN | | RPRDLISDIN | GIPARFS | TEQDSKD |
| | NSKNTLYL | STYRVVSVLTVLHQDWLNGK | | VIVLELKGSE | GSGSGTE | STYSLSS |
| | QMNSLRAE | EYKCKVSNKALPAPIEKTIS | | TTFMCEYADE | FTLTISS | TLTLSKA |
| | DTAVYYCA | KAKGQPREPQVYTLPPSREE | | TATIVEFINR | LQSEDFA | DYEKHKV |
| | RERVDWNS | MTKNQVSLTCLVKGFYPSDI | | WITFSQSIIS | VYYCHQY | YACEVTH |
| | YFDLWGQG | AVEWESNGQPENNYKTTPPV | | TLT (SEQ | YTWPYTF | QGLSSPV |
| | TLVTVSS | LDSDGSFFLYSKLTVDKSRW | | ID NO: 41) | GQGTKVE | TKSFNRG |
| | (SEQ ID | QQGNVFSCSVMHEALHNHYT | | | IK (SEQ | EC (SEQ |
| | NO: 801) | QKSLSLSPG (SEQ ID | | | ID NO: | ID NO: |
| | | NO: 44) | | | 802) | 45) |
| MIAB | EVQLLESG | ASTKGPSVFPLAPSSKSTSG | GGGGS | APTSSSTKKT | EIVMTQS | RTVAAPS |
| 83 | GGLVQPGG | GTAALGCLVKDYFPEPVTVS | (SEQ | QLQLEHLLLD | PATLSVS | VFIFPPS |
| | SLRLSCAA | WNSGALTSGVHTFPAVLQSS | ID NO: | LQMILNGINN | PGERATL | DEQLKSG |
| | SGFIFTDY | GLYSLSSVVTVPSSSLGTQT | 23) | YKNPKLTRML | SCRASES | TASVVCL |
| | AMSWVRQA | YICNVNHKPSNTKVDKKVEP | | TFKFYMPKKA | VRSNLAW | LNNFYPR |
| | PGKGLEWS | KSCDKTHTCPPCPAPEAAGA | | TELKHLQCLE | YQQKPGQ | EAKVQWK |
| | AITGSGGT | PSVFLFPPKPKDTLMISRTP | | EELKPLEEAL | APRLLIY | VDNALQS |
| | TYYADSVK | EVTCVVVDVSHEDPEVKFNW | | NLAPSKNFHL | DASTRTT | GNSQESV |
| | GRFTISRD | YVDGVEVHNAKTKPREEQYN | | RPRDLISDIN | GIPARFS | TEQDSKD |
| | NSKNTLYL | STYRVVSVLTVLHQDWLNGK | | VIVLELKGSE | GSGSGTE | STYSLSS |
| | QMNSLRAE | EYKCKVSNKALPAPIEKTIS | | TTFMCEYADE | FTLTISS | TLTLSKA |
| | DTAVYYCA | KAKGQPREPQVYTLPPSREE | | TATIVEFINR | LQSEDFA | DYEKHKV |
| | REGVDWNS | MTKNQVSLTCLVKGFYPSDI | | WITFSQSIIS | VYYCQQY | YACEVTH |
| | YFDLWGQG | AVEWESNGQPENNYKTTPPV | | TLT (SEQ | KTLPHTF | QGLSSPV |
| | TLVTVSS | LDSDGSFFLYSKLTVDKSRW | | ID NO: 41) | GQGTKVE | TKSFNRG |
| | (SEQ ID | QQGNVFSCSVMHEALHNHYT | | | IK (SEQ | EC (SEQ |
| | NO: 803) | QKSLSLSPG (SEQ ID | | | ID NO: | ID NO: |
| | | NO: 44) | | | 804) | 45) |
| MIAB | EVQLLESG | ASTKGPSVFPLAPSSKSTSG | GGGGS | APTSSSTKKT | EIVMTQS | RTVAAPS |
| 84 | GGLVQPGG | GTAALGCLVKDYFPEPVTVS | (SEQ | QLQLEHLLLD | PATLSVS | VFIFPPS |
| | SLRLSCAA | WNSGALTSGVHTFPAVLQSS | ID NO: | LQMILNGINN | PGERATL | DEQLKSG |
| | SGFTFSSY | GLYSLSSVVTVPSSSLGTQT | 23) | YKNPKLTRML | SCRASQS | TASVVCL |
| | AMTWVRQA | YICNVNHKPSNTKVDKKVEP | | TFKFYMPKKA | VSSRLAW | LNNFYPR |
| | PGKGLEWS | KSCDKTHTCPPCPAPEAAGA | | TELKHLQCLE | YQQKPGQ | EAKVQWK |
| | TISGSGRS | PSVFLFPPKPKDTLMISRTP | | EELKPLEEAL | APRLLIY | VDNALQS |
| | TYYADSVK | EVTCVVVDVSHEDPEVKFNW | | NLAPSKNFHL | GASTSAT | GNSQESV |
| | GRFTISRD | YVDGVEVHNAKTKPREEQYN | | RPRDLISDIN | GIPARFS | TEQDSKD |
| | NSKNTLYL | STYRVVSVLTVLHQDWLNGK | | VIVLELKGSE | GSGSGTE | STYSLSS |
| | QMNSLRAE | EYKCKVSNKALPAPIEKTIS | | TTFMCEYADE | FTLTISS | TLTLSKA |
| | DTAVYYCT | KAKGQPREPQVYTLPPSREE | | TATIVEFINR | LQSEDFA | DYEKHKV |
| | RERVDWNS | MTKNQVSLTCLVKGFYPSDI | | WITFSQSIIS | VYYCQHY | YACEVTH |
| | YFDLWGQG | AVEWESNGQPENNYKTTPPV | | TLT (SEQ | YNWPPTF | QGLSSPV |
| | TLVTVSS | LDSDGSFFLYSKLTVDKSRW | | ID NO: 41) | GQGTKVE | TKSFNRG |
| | (SEQ ID | QQGNVFSCSVMHEALHNHYT | | | IK (SEQ | EC (SEQ |
| | NO: 805) | QKSLSLSPG (SEQ ID | | | ID NO: | ID NO: |
| | | NO: 44) | | | 806) | 45) |
| MIAB | EVQLLESG | ASTKGPSVFPLAPSSKSTSG | GGGGS | APTSSSTKKT | EIVMTQS | RTVAAPS |
| 85 | GGLVQPGG | GTAALGCLVKDYFPEPVTVS | (SEQ | QLQLEHLLLD | PATLSVS | VFIFPPS |
| | SLRLSCAA | WNSGALTSGVHTFPAVLQSS | ID NO: | LQMILNGINN | PGERATL | DEQLKSG |
| | SGFTFDDY | GLYSLSSVVTVPSSSLGTQT | 23) | YKNPKLTRML | SCRASQS | TASVVCL |
| | AMHWVRQA | YICNVNHKPSNTKVDKKVEP | | TFKFYMPKKA | ISSNLAW | LNNFYPR |
| | PGKGLEWV | KSCDKTHTCPPCPAPEAAGA | | TELKHLQCLE | YQQKPGQ | EAKVQWK |
| | ASITSSSA | PSVFLFPPKPKDTLMISRTP | | EELKPLEEAL | APRLLIY | VDNALQS |
| | FIDYADSV | EVTCVVVDVSHEDPEVKFNW | | NLAPSKNFHL | DASTTAT | GNSQESV |
| | KGRFTISR | YVDGVEVHNAKTKPREEQYN | | RPRDLISDIN | GIPARFS | TEQDSKD |
| | DNSKNTLY | STYRVVSVLTVLHQDWLNGK | | VIVLELKGSE | GSGSGTE | STYSLSS |
| | LQMNSLRA | EYKCKVSNKALPAPIEKTIS | | TTFMCEYADE | FTLTISS | TLTLSKA |
| | EDTAVYYC | KAKGQPREPQVYTLPPSREE | | TATIVEFINR | LQSEDFA | DYEKHKV |
| | ARERRDWN | MTKNQVSLTCLVKGFYPSDI | | WITFSQSIIS | VYYCQQY | YACEVTH |
| | SYFDLWGQ | AVEWESNGQPENNYKTTPPV | | TLT (SEQ | HLWPPTF | QGLSSPV |
| | GTLVTVSS | LDSDGSFFLYSKLTVDKSRW | | ID NO: 41) | GQGTKVE | TKSFNRG |
| | (SEQ ID | QQGNVFSCSVMHEALHNHYT | | | IK (SEQ | EC (SEQ |
| | NO: 807) | QKSLSLSPG (SEQ ID | | | ID NO: | ID NO: |
| | | NO: 44) | | | 808) | 45) |
| MIAB | EVQLLESG | ASTKGPSVFPLAPSSKSTSG | GGGGS | APTSSSTKKT | EIVMTQS | RTVAAPS |
| 86 | GGLVQPGG | GTAALGCLVKDYFPEPVTVS | (SEQ | QLQLEHLLLD | PATLSVS | VFIFPPS |
| | SLRLSCAA | WNSGALTSGVHTFPAVLQSS | ID NO: | LQMILNGINN | PGERATL | DEQLKSG |
| | SGFTFNNY | GLYSLSSVVTVPSSSLGTQT | 23) | YKNPKLTRML | SCRASQS | TASVVCL |
| | AMSWVRQA | YICNVNHKPSNTKVDKKVEP | | TFKFYMPKKA | VNDNLAW | LNNFYPR |
| | PGKGLEWS | KSCDKTHTCPPCPAPEAAGA | | TELKHLQCLE | YQQKPGQ | EAKVQWK |
| | TITSSGAS | PSVFLFPPKPKDTLMISRTP | | EELKPLEEAL | APRLLIY | VDNALQS |
| | TFYADSVK | EVTCVVVDVSHEDPEVKFNW | | NLAPSKNFHL | AASTRVT | GNSQESV |
| | GRFTISRD | YVDGVEVHNAKTKPREEQYN | | RPRDLISDIN | GIPARFS | TEQDSKD |
| | NSKNTLYL | STYRVVSVLTVLHQDWLNGK | | VIVLELKGSE | GSGSGTE | STYSLSS |
| | QMNSLRAE | EYKCKVSNKALPAPIEKTIS | | TTFMCEYADE | FTLTISS | TLTLSKA |
| | DTAVYYCA | KAKGQPREPQVYTLPPSREE | | TATIVEFINR | LQSEDFA | DYEKHKV |
| | RERVDKNS | MTKNQVSLTCLVKGFYPSDI | | WITFSQSIIS | VYYCQQY | YACEVTH |
| | YFDLWGQG | AVEWESNGQPENNYKTTPPV | | TLT (SEQ | KTWPLTF | QGLSSPV |
| | TLVTVSS | LDSDGSFFLYSKLTVDKSRW | | ID NO: 41) | GQGTKVE | TKSFNRG |
| | (SEQ ID | QQGNVFSCSVMHEALHNHYT | | | IK (SEQ | EC (SEQ |
| | NO: 809) | QKSLSLSPG (SEQ ID | | | ID NO: | ID NO: |
| | | NO: 44) | | | 810) | 45) |
| MIAB | EVQLLESG | ASTKGPSVFPLAPSSKSTSG | GGGGS | APTSSSTKKT | EIVMTQS | RTVAAPS |
| 87 | GGLVQPGG | GTAALGCLVKDYFPEPVTVS | (SEQ | QLQLEHLLLD | PATLSVS | VFIFPPS |
| | SLRLSCAA | WNSGALTSGVHTFPAVLQSS | ID NO: | LQMILNGINN | PGERATL | DEQLKSG |
| | SGLTFSSS | GLYSLSSVVTVPSSSLGTQT | 23) | YKNPKLTRML | SCRTSQS | TASVVCL |
| | AMSWVRQA | YICNVNHKPSNTKVDKKVEP | | TFKFYMPKKA | VSSNLAW | LNNFYPR |
| | PGKGLEWS | KSCDKTHTCPPCPAPEAAGA | | TELKHLQCLE | YQQKPGQ | EAKVQWK |
| | AIRGSGGS | PSVFLFPPKPKDTLMISRTP | | EELKPLEEAL | APRLLIY | VDNALQS |
| | TYYADSVK | EVTCVVVDVSHEDPEVKFNW | | NLAPSKNFHL | GISTRAT | GNSQESV |
| | GRFTISRD | YVDGVEVHNAKTKPREEQYN | | RPRDLISDIN | GIPARFS | TEQDSKD |
| | NSKNTLYL | STYRVVSVLTVLHQDWLNGK | | VIVLELKGSE | GSGSGTE | STYSLSS |
| | QMNSLRAE | EYKCKVSNKALPAPIEKTIS | | TTFMCEYADE | FTLTISS | TLTLSKA |
| | DTAVYYCT | KAKGQPREPQVYTLPPSREE | | TATIVEFINR | LQSEDFA | DYEKHKV |
| | RERVDWNS | MTKNQVSLTCLVKGFYPSDI | | WITFSQSIIS | VYYCQQY | YACEVTH |
| | YFDLWGQG | AVEWESNGQPENNYKTTPPV | | TLT (SEQ | KTWPWTF | QGLSSPV |
| | TLVTVSS | LDSDGSFFLYSKLTVDKSRW | | ID NO: 41) | GQGTKVE | TKSFNRG |
| | (SEQ ID | QQGNVFSCSVMHEALHNHYT | | | IK (SEQ | EC (SEQ |
| | NO: 811) | QKSLSLSPG (SEQ ID | | | ID NO: | ID NO: |
| | | NO: 44) | | | 812) | 45) |
| MIAB | EVQLLESG | ASTKGPSVFPLAPSSKSTSG | GGGGS | APTSSSTKKT | EIVMTQS | RTVAAPS |
| 88 | GGLVQPGG | GTAALGCLVKDYFPEPVTVS | (SEQ | QLQLEHLLLD | PATLSVS | VFIFPPS |
| | SLRLSCAA | WNSGALTSGVHTFPAVLQSS | ID NO: | LQMILNGINN | PGERATL | DEQLKSG |
| | SGFIFSNY | GLYSLSSVVTVPSSSLGTQT | 23) | YKNPKLTRML | SCRASQS | TASVVCL |
| | GMSWVRQA | YICNVNHKPSNTKVDKKVEP | | TFKFYMPKKA | VRGNLAW | LNNFYPR |
| | PGKGLEWS | KSCDKTHTCPPCPAPEAAGA | | TELKHLQCLE | YQQKPGQ | EAKVQWK |
| | TISSSGAF | PSVFLFPPKPKDTLMISRTP | | EELKPLEEAL | APRLLIY | VDNALQS |
| | TYYADSVK | EVTCVVVDVSHEDPEVKFNW | | NLAPSKNFHL | GASTRAN | GNSQESV |
| | GRFTISRD | YVDGVEVHNAKTKPREEQYN | | RPRDLISDIN | GIPARFS | TEQDSKD |
| | NSKNTLYL | STYRVVSVLTVLHQDWLNGK | | VIVLELKGSE | GSGSGTE | STYSLSS |
| | QMNSLRAE | EYKCKVSNKALPAPIEKTIS | | TTFMCEYADE | FTLTISS | TLTLSKA |
| | DTAVYYNA | KAKGQPREPQVYTLPPSREE | | TATIVEFINR | LQSEDFA | DYEKHKV |
| | RERVDWNS | MTKNQVSLTCLVKGFYPSDI | | WITFSQSIIS | VYYCQQY | YACEVTH |
| | YFDLWGQG | AVEWESNGQPENNYKTTPPV | | TLT (SEQ | YRWPPTF | QGLSSPV |
| | TLVTVSS | LDSDGSFFLYSKLTVDKSRW | | ID NO: 41) | GQGTKVE | TKSFNRG |
| | (SEQ ID | QQGNVFSCSVMHEALHNHYT | | | IK (SEQ | EC (SEQ |
| | NO: 813) | QKSLSLSPG (SEQ ID | | | ID NO: | ID NO: |
| | | NO: 44) | | | 814) | 45) |
| MIAB | EVQLLESG | ASTKGPSVFPLAPSSKSTSG | GGGGS | APTSSSTKKT | EIVMTQS | RTVAAPS |
| 89 | GGLVQPGG | GTAALGCLVKDYFPEPVTVS | (SEQ | QLQLEHLLLD | PATLSVS | VFIFPPS |
| | SLRLSCAA | WNSGALTSGVHTFPAVLQSS | ID NO: | LQMILNGINN | PGERATL | DEQLKSG |
| | SGFTFSSY | GLYSLSSVVTVPSSSLGTQT | 23) | YKNPKLTRML | SCRASQS | TASVVCL |
| | AMSWVRQA | YICNVNHKPSNTKVDKKVEP | | TFKFYMPKKA | ISSYLAW | LNNFYPR |
| | PGKGLEWS | KSCDKTHTCPPCPAPEAAGA | | TELKHLQCLE | YQQKPGQ | EAKVQWK |
| | SISGSSGS | PSVFLFPPKPKDTLMISRTP | | EELKPLEEAL | APRLLIY | VDNALQS |
| | IFYADSVK | EVTCVVVDVSHEDPEVKFNW | | NLAPSKNFHL | AASNRAT | GNSQESV |
| | GRFTISRD | YVDGVEVHNAKTKPREEQYN | | RPRDLISDIN | GIPARFS | TEQDSKD |
| | NSKNTLYL | STYRVVSVLTVLHQDWLNGK | | VIVLELKGSE | GSGSGTE | STYSLSS |
| | QMNSLRAE | EYKCKVSNKALPAPIEKTIS | | TTFMCEYADE | FTLTISS | TLTLSKA |
| | DTAVYYCA | KAKGQPREPQVYTLPPSREE | | TATIVEFINR | LQSEDFA | DYEKHKV |
| | RERVDWNS | MTKNQVSLTCLVKGFYPSDI | | WITFSQSIIS | VYYCQQY | YACEVTH |
| | YFDEWGQG | AVEWESNGQPENNYKTTPPV | | TLT (SEQ | STWPQTF | QGLSSPV |
| | TLVTVSS | LDSDGSFFLYSKLTVDKSRW | | ID NO: 41) | GQGTKVE | TKSFNRG |
| | (SEQ ID | QQGNVFSCSVMHEALHNHYT | | | IK (SEQ | EC (SEQ |
| | NO: 815) | QKSLSLSPG (SEQ ID | | | ID NO: | ID NO: |
| | | NO: 44) | | | 816) | 45) |
| MIAB | EVQLLESG | ASTKGPSVFPLAPSSKSTSG | GGGGS | APTSSSTKKT | EIVMTQS | RTVAAPS |
| 90 | GGLVQPGG | GTAALGCLVKDYFPEPVTVS | (SEQ | QLQLEHLLLD | PATLSVS | VFIFPPS |
| | SLRLSCAA | WNSGALTSGVHTFPAVLQSS | ID NO: | LQMILNGINN | PGERATL | DEQLKSG |
| | SGFSFSTY | GLYSLSSVVTVPSSSLGTQT | 23) | YKNPKLTRML | SCRASQS | TASVVCL |
| | AMSWVRQA | YICNVNHKPSNTKVDKKVEP | | TFKFYMPKKA | VSSNVAW | LNNFYPR |
| | PGKGLEWS | KSCDKTHTCPPCPAPEAAGA | | TELKHLQCLE | YQQKPGQ | EAKVQWK |
| | GISGSGGN | PSVFLFPPKPKDTLMISRTP | | EELKPLEEAL | APRLLIY | VDNALQS |
| | THYADSVK | EVTCVVVDVSHEDPEVKFNW | | NLAPSKNFHL | GASTRAT | GNSQESV |
| | GRFTISRD | YVDGVEVHNAKTKPREEQYN | | RPRDLISDIN | GIPARFS | TEQDSKD |
| | NSKNTLYL | STYRVVSVLTVLHQDWLNGK | | VIVLELKGSE | GSGSGTE | STYSLSS |
| | QMNSLRAE | EYKCKVSNKALPAPIEKTIS | | TTFMCEYADE | FTLTISS | TLTLSKA |
| | DTAVYYCA | KAKGQPREPQVYTLPPSREE | | TATIVEFINR | LQSEDFA | DYEKHKV |
| | RERVDWNS | MTKNQVSLTCLVKGFYPSDI | | WITFSQSIIS | VYYCQQY | YACEVTH |
| | NFDLWGQG | AVEWESNGQPENNYKTTPPV | | TLT (SEQ | YDYPRTF | QGLSSPV |
| | TLVTVSS | LDSDGSFFLYSKLTVDKSRW | | ID NO: 41) | GQGTKVE | TKSFNRG |
| | (SEQ ID | QQGNVFSCSVMHEALHNHYT | | | IK (SEQ | EC (SEQ |
| | NO: 817) | QKSLSLSPG (SEQ ID | | | ID NO: | ID NO: |
| | | NO: 44) | | | 818) | 45) |
| MIAB | EVQLLESG | ASTKGPSVFPLAPSSKSTSG | GGGGS | APTSSSTKKT | EIVMTQS | RTVAAPS |
| 91 | GGLVQPGG | GTAALGCLVKDYFPEPVTVS | (SEQ | QLQLEHLLLD | PATLSVS | VFIFPPS |
| | SLRLSCAA | WNSGALTSGVHTFPAVLQSS | ID NO: | LQMILNGINN | PGERATL | DEQLKSG |
| | SGFTSSSY | GLYSLSSVVTVPSSSLGTQT | 23) | YKNPKLTRML | SCRASQS | TASVVCL |
| | AMGWVRQA | YICNVNHKPSNTKVDKKVEP | | TFKFYMPKKA | VSDKLAW | LNNFYPR |
| | PGKGLEWA | KSCDKTHTCPPCPAPEAAGA | | TELKHLQCLE | YQQKPGQ | EAKVQWK |
| | SISYSGGS | PSVFLFPPKPKDTLMISRTP | | EELKPLEEAL | APRLLIY | VDNALQS |
| | TDYADSVK | EVTCVVVDVSHEDPEVKFNW | | NLAPSKNFHL | GASSRAA | GNSQESV |
| | GRFTISRD | YVDGVEVHNAKTKPREEQYN | | RPRDLISDIN | GIPARFS | TEQDSKD |
| | NSKNTLYI | STYRVVSVLTVLHQDWLNGK | | VIVLELKGSE | GSGSGTE | STYSLSS |
| | QMNSLRAE | EYKCKVSNKALPAPIEKTIS | | TTFMCEYADE | FTLTISS | TLTLSKA |
| | DTAVYYCA | KAKGQPREPQVYTLPPSREE | | TATIVEFINR | LQSEDFA | DYEKHKV |
| | RERVDWNS | MTKNQVSLTCLVKGFYPSDI | | WITFSQSIIS | VYYCQQY | YACEVTH |
| | YFGLWGQG | AVEWESNGQPENNYKTTPPV | | TLT (SEQ | YDWPPTF | QGLSSPV |
| | TLVTVSS | LDSDGSFFLYSKLTVDKSRW | | ID NO: 41) | GQGTKVE | TKSFNRG |
| | (SEQ ID | QQGNVFSCSVMHEALHNHYT | | | IK (SEQ | EC (SEQ |
| | NO: 819) | QKSLSLSPG (SEQ ID | | | ID NO: | ID NO: |
| | | NO: 44) | | | 820) | 45) |
| MIAB | EVQLLESG | ASTKGPSVFPLAPSSKSTSG | GGGGS | APTSSSTKKT | EIVMTQS | RTVAAPS |
| 92 | GGLVQPGG | GTAALGCLVKDYFPEPVTVS | (SEQ | QLQLEHLLLD | PATLSVS | VFIFPPS |
| | SLRLSCAA | WNSGALTSGVHTFPAVLQSS | ID NO: | LQMILNGINN | PGERATL | DEQLKSG |
| | SGFIFRNY | GLYSLSSVVTVPSSSLGTQT | 23) | YKNPKLTRML | SCRASHS | TASVVCL |
| | AMSWVRQA | YICNVNHKPSNTKVDKKVEP | | TFKFYMPKKA | VSSNLAW | LNNFYPR |
| | PGKGLEWS | KSCDKTHTCPPCPAPEAAGA | | TELKHLQCLE | YQQKPGQ | EAKVQWK |
| | AITGSGGT | PSVFLFPPKPKDTLMISRTP | | EELKPLEEAL | APRLLIY | VDNALQS |
| | TDYADSVK | EVTCVVVDVSHEDPEVKFNW | | NLAPSKNFHL | GAATRAT | GNSQESV |
| | GRFTISRD | YVDGVEVHNAKTKPREEQYN | | RPRDLISDIN | GIPARFS | TEQDSKD |
| | NSKNTLYL | STYRVVSVLTVLHQDWLNGK | | VIVLELKGSE | GSGSGTE | STYSLSS |
| | QMNSLRAE | EYKCKVSNKALPAPIEKTIS | | TTFMCEYADE | FTLTISS | TLTLSKA |
| | DTAVYYCA | KAKGQPREPQVYTLPPSREE | | TATIVEFINR | LQSEDFA | DYEKHKV |
| | RERVDWYS | MTKNQVSLTCLVKGFYPSDI | | WITFSQSIIS | VYYCQQY | YACEVTH |
| | YFDLWGQG | AVEWESNGQPENNYKTTPPV | | TLT (SEQ | NNRPPTF | QGLSSPV |
| | TLVTVSS | LDSDGSFFLYSKLTVDKSRW | | ID NO: 41) | GQGTKVE | TKSFNRG |
| | (SEQ ID | QQGNVFSCSVMHEALHNHYT | | | IK (SEQ | EC (SEQ |
| | NO: 821) | QKSLSLSPG (SEQ ID | | | ID NO: | ID NO: |
| | | NO: 44) | | | 822) | 45) |
| MIAB | EVQLLESG | ASTKGPSVFPLAPSSKSTSG | GGGGS | APTSSSTKKT | EIVMTQS | RTVAAPS |
| 93 | GGLVQPGG | GTAALGCLVKDYFPEPVTVS | (SEQ | QLQLEHLLLD | PATLSVS | VFIFPPS |
| | SLRLSCAA | WNSGALTSGVHTFPAVLQSS | ID NO: | LQMILNGINN | PGERATL | DEQLKSG |
| | SGFTFNFY | GLYSLSSVVTVPSSSLGTQT | 23) | YKNPKLTRML | SCTASQS | TASVVCL |
| | AMSWVRQA | YICNVNHKPSNTKVDKKVEP | | TFKFYMPKKA | VSSNLAW | LNNFYPR |
| | PGKGLEWA | KSCDKTHTCPPCPAPEAAGA | | TELKHLQCLE | YQQKPGQ | EAKVQWK |
| | AISSSSGR | PSVFLFPPKPKDTLMISRTP | | EELKPLEEAL | APRLLIY | VDNALQS |
| | TYYADSVK | EVTCVVVDVSHEDPEVKFNW | | NLAPSKNFHL | DATTRAT | GNSQESV |
| | GRFTISRD | YVDGVEVHNAKTKPREEQYN | | RPRDLISDIN | GIPARFS | TEQDSKD |
| | NSKNTLYL | STYRVVSVLTVLHQDWLNGK | | VIVLELKGSE | GSGSGTE | STYSLSS |
| | QMNSLRAE | EYKCKVSNKALPAPIEKTIS | | TTFMCEYADE | FTLTISS | TLTLSKA |
| | DTAVYYCA | KAKGQPREPQVYTLPPSREE | | TATIVEFINR | LQSEDFA | DYEKHKV |
| | REDVDWNS | MTKNQVSLTCLVKGFYPSDI | | WITFSQSIIS | VYYCQQY | YACEVTH |
| | YFDLWGQG | AVEWESNGQPENNYKTTPPV | | TLT (SEQ | TTWPPTF | QGLSSPV |
| | TLVTVSS | LDSDGSFFLYSKLTVDKSRW | | ID NO: 41) | GQGTKVE | TKSFNRG |
| | (SEQ ID | QQGNVFSCSVMHEALHNHYT | | | IK (SEQ | EC (SEQ |
| | NO: 823) | QKSLSLSPG (SEQ ID | | | ID NO: | ID NO: |
| | | NO: 44) | | | 824) | 45) |
| MIAB | EVQLLESG | ASTKGPSVFPLAPSSKSTSG | GGGGS | APTSSSTKKT | EIVMTQS | RTVAAPS |
| 94 | GGLVQPGG | GTAALGCLVKDYFPEPVTVS | (SEQ | QLQLEHLLLD | PATLSVS | VFIFPPS |
| | SLRLSCAA | WNSGALTSGVHTFPAVLQSS | ID NO: | LQMILNGINN | PGERATL | DEQLKSG |
| | SGFTFGNY | GLYSLSSVVTVPSSSLGTQT | 23) | YKNPKLTRML | SCRASQS | TASVVCL |
| | AMTWVRQA | YICNVNHKPSNTKVDKKVEP | | TFKFYMPKKA | ISTSLAW | LNNFYPR |
| | PGKGLEWS | KSCDKTHTCPPCPAPEAAGA | | TELKHLQCLE | YQQKPGQ | EAKVQWK |
| | TITSSGGS | PSVFLFPPKPKDTLMISRTP | | EELKPLEEAL | APRLLIY | VDNALQS |
| | TDYADSVK | EVTCVVVDVSHEDPEVKFNW | | NLAPSKNFHL | GASTRAG | GNSQESV |
| | GRFTISRD | YVDGVEVHNAKTKPREEQYN | | RPRDLISDIN | GIPARFS | TEQDSKD |
| | NSKNTLYL | STYRVVSVLTVLHQDWLNGK | | VIVLELKGSE | GSGSGTE | STYSLSS |
| | QMNSLRAE | EYKCKVSNKALPAPIEKTIS | | TTFMCEYADE | FTLTISS | TLTLSKA |
| | DTAVYYCA | KAKGQPREPQVYTLPPSREE | | TATIVEFINR | LQSEDFA | DYEKHKV |
| | RERVDENS | MTKNQVSLTCLVKGFYPSDI | | WITFSQSIIS | VYYCQQY | YACEVTH |
| | YFDLWGQG | AVEWESNGQPENNYKTTPPV | | TLT (SEQ | DDWPPTF | QGLSSPV |
| | TLVTVSS | LDSDGSFFLYSKLTVDKSRW | | ID NO: 41) | GQGTKVE | TKSFNRG |
| | (SEQ ID | QQGNVFSCSVMHEALHNHYT | | | IK (SEQ | EC (SEQ |
| | NO: 825) | QKSLSLSPG (SEQ ID | | | ID NO: | ID NO: |
| | | NO: 44) | | | 826) | 45) |
| MIAB | EVQLLESG | ASTKGPSVFPLAPSSKSTSG | GGGGS | APTSSSTKKT | EIVMTQS | RTVAAPS |
| 95 | GGLVQPGG | GTAALGCLVKDYFPEPVTVS | (SEQ | QLQLEHLLLD | PATLSVS | VFIFPPS |
| | SLRLSCAA | WNSGALTSGVHTFPAVLQSS | ID NO: | LQMILNGINN | PGERATL | DEQLKSG |
| | SGFTLSNY | GLYSLSSVVTVPSSSLGTQT | 23) | YKNPKLTRML | SCRASQS | TASVVCL |
| | AMSWVRQA | YICNVNHKPSNTKVDKKVEP | | TFKFYMPKKA | VSSNVAW | LNNFYPR |
| | PGKGLEWS | KSCDKTHTCPPCPAPEAAGA | | TELKHLQCLE | YQQKPGQ | EAKVQWK |
| | AISGSGGR | PSVFLFPPKPKDTLMISRTP | | EELKPLEEAL | APRLLIY | VDNALQS |
| | TYYADSVK | EVTCVVVDVSHEDPEVKFNW | | NLAPSKNFHL | DASSRAT | GNSQESV |
| | GRFTISRD | YVDGVEVHNAKTKPREEQYN | | RPRDLISDIN | GIPARFS | TEQDSKD |
| | NSKNTLYL | STYRVVSVLTVLHQDWLNGK | | VIVLELKGSE | GSGSGTE | STYSLSS |
| | QMNSLRAE | EYKCKVSNKALPAPIEKTIS | | TTFMCEYADE | FTLTISS | TLTLSKA |
| | DTAVYYCA | KAKGQPREPQVYTLPPSREE | | TATIVEFINR | LQSEDFA | DYEKHKV |
| | RERVDWNS | MTKNQVSLTCLVKGFYPSDI | | WITFSQSIIS | VYYCQQY | YACEVTH |
| | YNDLWGQG | AVEWESNGQPENNYKTTPPV | | TLT (SEQ | KTLPHTF | QGLSSPV |
| | TLVTVSS | LDSDGSFFLYSKLTVDKSRW | | ID NO: 41) | GQGTKVE | TKSFNRG |
| | (SEQ ID | QQGNVFSCSVMHEALHNHYT | | | IK (SEQ | EC (SEQ |
| | NO: 827) | QKSLSLSPG (SEQ ID | | | ID NO: | ID NO: |
| | | NO: 44) | | | 828) | 45) |
| MIAB | EVQLLESG | ASTKGPSVFPLAPSSKSTSG | GGGGS | APTSSSTKKT | EIVMTQS | RTVAAPS |
| 96 | GGLVQPGG | GTAALGCLVKDYFPEPVTVS | (SEQ | QLQLEHLLLD | PATLSVS | VFIFPPS |
| | SLRLSCAA | WNSGALTSGVHTFPAVLQSS | ID NO: | LQMILNGINN | PGERATL | DEQLKSG |
| | SGFTFSTY | GLYSLSSVVTVPSSSLGTQT | 23) | YKNPKLTRML | SCRASQS | TASVVCL |
| | AMIWVRQA | YICNVNHKPSNTKVDKKVEP | | TFKFYMPKKA | ISGNLAW | LNNFYPR |
| | PGKGLEWS | KSCDKTHTCPPCPAPEAAGA | | TELKHLQCLE | YQQKPGQ | EAKVQWK |
| | AISSSGGS | PSVFLFPPKPKDTLMISRTP | | EELKPLEEAL | APRLLIY | VDNALQS |
| | IDYADSVK | EVTCVVVDVSHEDPEVKFNW | | NLAPSKNFHL | DASTRAA | GNSQESV |
| | GRFTISRD | YVDGVEVHNAKTKPREEQYN | | RPRDLISDIN | GIPARFS | TEQDSKD |
| | NSKNTLYL | STYRVVSVLTVLHQDWLNGK | | VIVLELKGSE | GSGSGTE | STYSLSS |
| | QMNSLRAE | EYKCKVSNKALPAPIEKTIS | | TTFMCEYADE | FTLTISS | TLTLSKA |
| | DTAVYYCA | KAKGQPREPQVYTLPPSREE | | TATIVEFINR | LQSEDFA | DYEKHKV |
| | RERVDANS | MTKNQVSLTCLVKGFYPSDI | | WITFSQSIIS | VYYCQQY | YACEVTH |
| | YFDLWGQG | AVEWESNGQPENNYKTTPPV | | TLT (SEQ | HNWPPTF | QGLSSPV |
| | TLVTVSS | LDSDGSFFLYSKLTVDKSRW | | ID NO: 41) | GQGTKVE | TKSFNRG |
| | (SEQ ID | QQGNVFSCSVMHEALHNHYT | | | IK (SEQ | EC (SEQ |
| | NO: 829) | QKSLSLSPG (SEQ ID | | | ID NO: | ID NO: |
| | | NO: 44) | | | 830) | 45) |
| MIAB | EVQLLESG | ASTKGPSVFPLAPSSKSTSG | GGGGS | APTSSSTKKT | EIVMTQS | RTVAAPS |
| 97 | GGLVQPGG | GTAALGCLVKDYFPEPVTVS | (SEQ | QLQLEHLLLD | PATLSVS | VFIFPPS |
| | SLRLSCAA | WNSGALTSGVHTFPAVLQSS | ID NO: | LQMILNGINN | PGERATL | DEQLKSG |
| | SGFSFSNY | GLYSLSSVVTVPSSSLGTQT | 23) | YKNPKLTRML | SCRASQS | TASVVCL |
| | AMTWVRQA | YICNVNHKPSNTKVDKKVEP | | TFKFYMPKKA | VSRNLAW | LNNFYPR |
| | PGKGLEWS | KSCDKTHTCPPCPAPEAAGA | | TELKHLQCLE | YQQKPGQ | EAKVQWK |
| | TITSSGGS | PSVFLFPPKPKDTLMISRTP | | EELKPLEEAL | APRLLIY | VDNALQS |
| | TDYADSVK | EVTCVVVDVSHEDPEVKFNW | | NLAPSKNFHL | SASARAT | GNSQESV |
| | GRFTISRD | YVDGVEVHNAKTKPREEQYN | | RPRDLISDIN | GIPARFS | TEQDSKD |
| | NSKNTLYL | STYRVVSVLTVLHQDWLNGK | | VIVLELKGSE | GSGSGTE | STYSLSS |
| | QMNSLRAE | EYKCKVSNKALPAPIEKTIS | | TTFMCEYADE | FTLTISS | TLTLSKA |
| | DTAVYYCA | KAKGQPREPQVYTLPPSREE | | TATIVEFINR | LQSEDFA | DYEKHKV |
| | RERVDWNS | MTKNQVSLTCLVKGFYPSDI | | WITFSQSIIS | VYYCQQY | YACEVTH |
| | YFDLWGQG | AVEWESNGQPENNYKTTPPV | | TLT (SEQ | KTLPHTF | QGLSSPV |
| | TLVTVSS | LDSDGSFFLYSKLTVDKSRW | | ID NO: 41) | GQGTKVE | TKSFNRG |
| | (SEQ ID | QQGNVFSCSVMHEALHNHYT | | | IK (SEQ | EC (SEQ |
| | NO: 831) | QKSLSLSPG (SEQ ID | | | ID NO: | ID NO: |
| | | NO: 44) | | | 832) | 45) |
| MIAB | EVQLLESG | ASTKGPSVFPLAPSSKSTSG | GGGGS | APTSSSTKKT | EIVMTQS | RTVAAPS |
| 98 | GGLVQPGG | GTAALGCLVKDYFPEPVTVS | (SEQ | QLQLEHLLLD | PATLSVS | VFIFPPS |
| | SLRLSCAA | WNSGALTSGVHTFPAVLQSS | ID NO: | LQMILNGINN | PGERATL | DEQLKSG |
| | SGFTLRNY | GLYSLSSVVTVPSSSLGTQT | 23) | YKNPKLTRML | SCRASQS | TASVVCL |
| | AMSWVRQA | YICNVNHKPSNTKVDKKVEP | | TFKFYMPKKA | VGNNLAW | LNNFYPR |
| | PGKGLEWS | KSCDKTHTCPPCPAPEAAGA | | TELKHLQCLE | YQQKPGQ | EAKVQWK |
| | GISGSGGS | PSVFLFPPKPKDTLMISRTP | | EELKPLEEAL | APRLLIY | VDNALQS |
| | PYYADSVK | EVTCVVVDVSHEDPEVKFNW | | NLAPSKNFHL | DASNRAT | GNSQESV |
| | GRFTISRD | YVDGVEVHNAKTKPREEQYN | | RPRDLISDIN | GIPARFS | TEQDSKD |
| | NSKNTLYL | STYRVVSVLTVLHQDWLNGK | | VIVLELKGSE | GSGSGTE | STYSLSS |
| | QMNSLRAE | EYKCKVSNKALPAPIEKTIS | | TTFMCEYADE | FTLTISS | TLTLSKA |
| | DTAVYYCA | KAKGQPREPQVYTLPPSREE | | TATIVEFINR | LQSEDFA | DYEKHKV |
| | RSRVDWNS | MTKNQVSLTCLVKGFYPSDI | | WITFSQSIIS | VYYCQQY | YACEVTH |
| | YFQLWGQG | AVEWESNGQPENNYKTTPPV | | TLT (SEQ | DDWPPTF | QGLSSPV |
| | TLVTVSS | LDSDGSFFLYSKLTVDKSRW | | ID NO: 41) | GQGTKVE | TKSFNRG |
| | (SEQ ID | QQGNVFSCSVMHEALHNHYT | | | IK (SEQ | EC (SEQ |
| | NO: 833) | QKSLSLSPG (SEQ ID | | | ID NO: | ID NO: |
| | | NO: 44) | | | 834) | 45) |
| MIAB | EVQLLESG | ASTKGPSVFPLAPSSKSTSG | GGGGS | APTSSSTKKT | EIVMTQS | RTVAAPS |
| 99 | GGLVQPGG | GTAALGCLVKDYFPEPVTVS | (SEQ | QLQLEHLLLD | PATLSVS | VFIFPPS |
| | SLRLSCAA | WNSGALTSGVHTFPAVLQSS | ID NO: | LQMILNGINN | PGERATL | DEQLKSG |
| | SGFTFSSF | GLYSLSSVVTVPSSSLGTQT | 23) | YKNPKLTRML | SCRASQS | TASVVCL |
| | GMSWVRQA | YICNVNHKPSNTKVDKKVEP | | TFKFYMPKKA | VGSNLAW | LNNFYPR |
| | PGKGLEWS | KSCDKTHTCPPCPAPEAAGA | | TELKHLQCLE | YQQKPGQ | EAKVQWK |
| | AISGGGGT | PSVFLFPPKPKDTLMISRTP | | EELKPLEEAL | APRLLIY | VDNALQS |
| | TYYADSVK | EVTCVVVDVSHEDPEVKFNW | | NLAPSKNFHL | DTSSRAT | GNSQESV |
| | GRFTISRD | YVDGVEVHNAKTKPREEQYN | | RPRDLISDIN | GIPARFS | TEQDSKD |
| | NSKNTLYL | STYRVVSVLTVLHQDWLNGK | | VIVLELKGSE | GSGSGTE | STYSLSS |
| | QMNSLRAE | EYKCKVSNKALPAPIEKTIS | | TTFMCEYADE | FTLTISS | TLTLSKA |
| | DTAVYYCA | KAKGQPREPQVYTLPPSREE | | TATIVEFINR | LQSEDFA | DYEKHKV |
| | RERVDWKS | MTKNQVSLTCLVKGFYPSDI | | WITFSQSIIS | VYYCQQY | YACEVTH |
| | YFDLWGQG | AVEWESNGQPENNYKTTPPV | | TLT (SEQ | KTWPFTF | QGLSSPV |
| | TLVTVSS | LDSDGSFFLYSKLTVDKSRW | | ID NO: 41) | GQGTKVE | TKSFNRG |
| | (SEQ ID | QQGNVFSCSVMHEALHNHYT | | | IK (SEQ | EC (SEQ |
| | NO: 835) | QKSLSLSPG (SEQ ID | | | ID NO: | ID NO: |
| | | NO: 44) | | | 836) | 45) |
| MIAB | EVQLLESG | ASTKGPSVFPLAPSSKSTSG | GGGGS | APTSSSTKKT | EIVMTQS | RTVAAPS |
| 100 | GGLVQPGG | GTAALGCLVKDYFPEPVTVS | (SEQ | QLQLEHLLLD | PATLSVS | VFIFPPS |
| | SLRLSCAA | WNSGALTSGVHTFPAVLQSS | ID NO: | LQMILNGINN | PGERATL | DEQLKSG |
| | SGFTFTTY | GLYSLSSVVTVPSSSLGTQT | 23) | YKNPKLTRML | SCRASQS | TASVVCL |
| | AMTWVRQA | YICNVNHKPSNTKVDKKVEP | | TFKFYMPKKA | IGTNLAW | LNNFYPR |
| | PGKGLEWS | KSCDKTHTCPPCPAPEAAGA | | TELKHLQCLE | YQQKPGQ | EAKVQWK |
| | TISGSGGS | PSVFLFPPKPKDTLMISRTP | | EELKPLEEAL | APRLLIY | VDNALQS |
| | TYYVDSVK | EVTCVVVDVSHEDPEVKFNW | | NLAPSKNFHL | SASSRAT | GNSQESV |
| | GRFTISRD | YVDGVEVHNAKTKPREEQYN | | RPRDLISDIN | GIPARFS | TEQDSKD |
| | NSKNTLYL | STYRVVSVLTVLHQDWLNGK | | VIVLELKGSE | GSGSGTE | STYSLSS |
| | QMNSLRAE | EYKCKVSNKALPAPIEKTIS | | TTFMCEYADE | FTLTISS | TLTLSKA |
| | DTAVYYCA | KAKGQPREPQVYTLPPSREE | | TATIVEFINR | LQSEDFA | DYEKHKV |
| | RVRVDWNS | MTKNQVSLTCLVKGFYPSDI | | WITFSQSIIS | VYYCQQY | YACEVTH |
| | YFDLWGQG | AVEWESNGQPENNYKTTPPV | | TLT (SEQ | YHWPQTF | QGLSSPV |
| | TLVTVSS | LDSDGSFFLYSKLTVDKSRW | | ID NO: 41) | GQGTKVE | TKSFNRG |
| | (SEQ ID | QQGNVFSCSVMHEALHNHYT | | | IK (SEQ | EC (SEQ |
| | NO: 837) | QKSLSLSPG (SEQ ID | | | ID NO: | ID NO: |
| | | NO: 44) | | | 838) | 45) |
| MIAB | EVQLLESG | ASTKGPSVFPLAPSSKSTSG | GGGGS | APTSSSTKKT | EIVMTQS | RTVAAPS |
| 101 | GGLVQPGG | GTAALGCLVKDYFPEPVTVS | (SEQ | QLQLEHLLLD | PATLSVS | VFIFPPS |
| | SLRLSCAA | WNSGALTSGVHTFPAVLQSS | ID NO: | LQMILNGINN | PGERATL | DEQLKSG |
| | SGFTFGSF | GLYSLSSVVTVPSSSLGTQT | 23) | YKNPKLTRML | SCRASQS | TASVVCL |
| | AMSWVRQA | YICNVNHKPSNTKVDKKVEP | | TFKFYMPKKA | VSTYLAW | LNNFYPR |
| | PGKGLEWS | KSCDKTHTCPPCPAPEAAGA | | TELKHLQCLE | YQQKPGQ | EAKVQWK |
| | VISGSGGS | PSVFLFPPKPKDTLMISRTP | | EELKPLEEAL | APRLLIY | VDNALQS |
| | THYADSVK | EVTCVVVDVSHEDPEVKFNW | | NLAPSKNFHL | GASNRAT | GNSQESV |
| | GRFTISRD | YVDGVEVHNAKTKPREEQYN | | RPRDLISDIN | GIPARFS | TEQDSKD |
| | NSKNTLYL | STYRVVSVLTVLHQDWLNGK | | VIVLELKGSE | GSGSGTE | STYSLSS |
| | QMNSLRAE | EYKCKVSNKALPAPIEKTIS | | TTFMCEYADE | FTLTISS | TLTLSKA |
| | DTAVYYCA | KAKGQPREPQVYTLPPSREE | | TATIVEFINR | LQSEDFA | DYEKHKV |
| | RERVDWNS | MTKNQVSLTCLVKGFYPSDI | | WITFSQSIIS | VYYCQQY | YACEVTH |
| | YFDLWGQG | AVEWESNGQPENNYKTTPPV | | TLT (SEQ | DTWPYTF | QGLSSPV |
| | TLVTVSS | LDSDGSFFLYSKLTVDKSRW | | ID NO: 41) | GQGTKVE | TKSFNRG |
| | (SEQ ID | QQGNVFSCSVMHEALHNHYT | | | IK (SEQ | EC (SEQ |
| | NO: 839) | QKSLSLSPG (SEQ ID | | | ID NO: | ID NO: |
| | | NO: 44) | | | 840) | 45) |
| MIAB | EVQLLESG | ASTKGPSVFPLAPSSKSTSG | GGGGS | APTSSSTKKT | EIVMTQS | RTVAAPS |
| 102 | GGLVQPGG | GTAALGCLVKDYFPEPVTVS | (SEQ | QLQLEHLLLD | PATLSVS | VFIFPPS |
| | SLRLSCAA | WNSGALTSGVHTFPAVLQSS | ID NO: | LQMILNGINN | PGERATL | DEQLKSG |
| | SGFTFTDY | GLYSLSSVVTVPSSSLGTQT | 23) | YKNPKLTRML | SCRTSQS | TASVVCL |
| | AMNWVRQA | YICNVNHKPSNTKVDKKVEP | | TFKFYMPKKA | VSSDLAW | LNNFYPR |
| | PGKGLEWS | KSCDKTHTCPPCPAPEAAGA | | TELKHLQCLE | YQQKPGQ | EAKVQWK |
| | TISGSGAT | PSVFLFPPKPKDTLMISRTP | | EELKPLEEAL | APRLLIY | VDNALQS |
| | TYYADSVK | EVTCVVVDVSHEDPEVKFNW | | NLAPSKNFHL | GPSTRAT | GNSQESV |
| | GRFTISRD | YVDGVEVHNAKTKPREEQYN | | RPRDLISDIN | GIPARFS | TEQDSKD |
| | NSKNTLYL | STYRVVSVLTVLHQDWLNGK | | VIVLELKGSE | GSGSGTE | STYSLSS |
| | QMNSLRAE | EYKCKVSNKALPAPIEKTIS | | TTFMCEYADE | FTLTISS | TLTLSKA |
| | DTAVYYCA | KAKGQPREPQVYTLPPSREE | | TATIVEFINR | LQSEDFA | DYEKHKV |
| | REDVDWNS | MTKNQVSLTCLVKGFYPSDI | | WITFSQSIIS | VYYCQQY | YACEVTH |
| | YFDLWGQG | AVEWESNGQPENNYKTTPPV | | TLT (SEQ | KTWPQTF | QGLSSPV |
| | TLVTVSS | LDSDGSFFLYSKLTVDKSRW | | ID NO: 41) | GQGTKVE | TKSFNRG |
| | (SEQ ID | QQGNVFSCSVMHEALHNHYT | | | IK (SEQ | EC (SEQ |
| | NO: 841) | QKSLSLSPG (SEQ ID | | | ID NO: | ID NO: |
| | | NO: 44) | | | 626) | 45) |
| MIAB | EVQLLESG | ASTKGPSVFPLAPSSKSTSG | GGGGS | APTSSSTKKT | EIVMTQS | RTVAAPS |
| 103 | GGLVQPGG | GTAALGCLVKDYFPEPVTVS | (SEQ | QLQLEHLLLD | PATLSVS | VFIFPPS |
| | SLRLSCAA | WNSGALTSGVHTFPAVLQSS | ID NO: | LQMILNGINN | PGERATL | DEQLKSG |
| | SGFTFSSY | GLYSLSSVVTVPSSSLGTQT | 23) | YKNPKLTRML | SCRASQS | TASVVCL |
| | AMNWVRQA | YICNVNHKPSNTKVDKKVEP | | TFKFYMPKKA | VSTDLAW | LNNFYPR |
| | PGKGLEWS | KSCDKTHTCPPCPAPEAAGA | | TELKHLQCLE | YQQKPGQ | EAKVQWK |
| | SISGSGGG | PSVFLFPPKPKDTLMISRTP | | EELKPLEEAL | APRLLIY | VDNALQS |
| | TYYADSVK | EVTCVVVDVSHEDPEVKFNW | | NLAPSKNFHL | AASTRVT | GNSQESV |
| | GRFTISRD | YVDGVEVHNAKTKPREEQYN | | RPRDLISDIN | GIPARFS | TEQDSKD |
| | NSKNTLYL | STYRVVSVLTVLHQDWLNGK | | VIVLELKGSE | GSGSGTE | STYSLSS |
| | QMNSLRAE | EYKCKVSNKALPAPIEKTIS | | TTFMCEYADE | FTLTISS | TLTLSKA |
| | DTAVYYCA | KAKGQPREPQVYTLPPSREE | | TATIVEFINR | LQSEDFA | DYEKHKV |
| | RERMDWNS | MTKNQVSLTCLVKGFYPSDI | | WITFSQSIIS | VYYCQQY | YACEVTH |
| | YFDLWGQG | AVEWESNGQPENNYKTTPPV | | TLT (SEQ | NTAPLTF | QGLSSPV |
| | TLVTVSS | LDSDGSFFLYSKLTVDKSRW | | ID NO: 41) | GQGTKVE | TKSFNRG |
| | (SEQ ID | QQGNVFSCSVMHEALHNHYT | | | IK (SEQ | EC (SEQ |
| | NO: 842) | QKSLSLSPG (SEQ ID | | | ID NO: | ID NO: |
| | | NO: 44) | | | 843) | 45) |
| MIAB | EVQLLESG | ASTKGPSVFPLAPSSKSTSG | GGGGS | APTSSSTKKT | EIVMTQS | RTVAAPS |
| 104 | GGLVQPGG | GTAALGCLVKDYFPEPVTVS | (SEQ | QLQLEHLLLD | PATLSVS | VFIFPPS |
| | SLRLSCAA | WNSGALTSGVHTFPAVLQSS | ID NO: | LQMILNGINN | PGERATL | DEQLKSG |
| | SGFSFGSY | GLYSLSSVVTVPSSSLGTQT | 23) | YKNPKLTRML | SCRASQS | TASVVCL |
| | AMSWVRQA | YICNVNHKPSNTKVDKKVEP | | TFKFYMPKKA | ISGNLAW | LNNFYPR |
| | PGKGLEWS | KSCDKTHTCPPCPAPEAAGA | | TELKHLQCLE | YQQKPGQ | EAKVQWK |
| | TISGSGAG | PSVFLFPPKPKDTLMISRTP | | EELKPLEEAL | APRLLIY | VDNALQS |
| | TYYADSVK | EVTCVVVDVSHEDPEVKFNW | | NLAPSKNFHL | GAATRAT | GNSQESV |
| | GRFTISRD | YVDGVEVHNAKTKPREEQYN | | RPRDLISDIN | GIPARFS | TEQDSKD |
| | NSKNTLYL | STYRVVSVLTVLHQDWLNGK | | VIVLELKGSE | GSGSGTE | STYSLSS |
| | QMNSLRAE | EYKCKVSNKALPAPIEKTIS | | TTFMCEYADE | FTLTISS | TLTLSKA |
| | DTAVYYCA | KAKGQPREPQVYTLPPSREE | | TATIVEFINR | LQSEDFA | DYEKHKV |
| | RERVDWNS | MTKNQVSLTCLVKGFYPSDI | | WITFSQSIIS | VYYCQQY | YACEVTH |
| | YIDLWGQG | AVEWESNGQPENNYKTTPPV | | TLT (SEQ | YKWPITF | QGLSSPV |
| | TLVTVSS | LDSDGSFFLYSKLTVDKSRW | | ID NO: 41) | GQGTKVE | TKSFNRG |
| | (SEQ ID | QQGNVFSCSVMHEALHNHYT | | | IK (SEQ | EC (SEQ |
| | NO: 844) | QKSLSLSPG (SEQ ID | | | ID NO: | ID NO: |
| | | NO: 44) | | | 845) | 45) |
| MIAB | EVQLLESG | ASTKGPSVFPLAPSSKSTSG | GGGGS | APTSSSTKKT | EIVMTQS | RTVAAPS |
| 105 | GGLVQPGG | GTAALGCLVKDYFPEPVTVS | (SEQ | QLQLEHLLLD | PATLSVS | VFIFPPS |
| | SLRLSCAA | WNSGALTSGVHTFPAVLQSS | ID NO: | LQMILNGINN | PGERATL | DEQLKSG |
| | SGFTFSSF | GLYSLSSVVTVPSSSLGTQT | 23) | YKNPKLTRML | SCRASQS | TASVVCL |
| | PMSWVRQA | YICNVNHKPSNTKVDKKVEP | | TFKFYMPKKA | VNNNLAW | LNNFYPR |
| | PGKDLEWS | KSCDKTHTCPPCPAPEAAGA | | TELKHLQCLE | YQQKPGQ | EAKVQWK |
| | SISGSGAS | PSVFLFPPKPKDTLMISRTP | | EELKPLEEAL | APRLLIY | VDNALQS |
| | IYYADSVK | EVTCVVVDVSHEDPEVKFNW | | NLAPSKNFHL | DASTRAI | GNSQESV |
| | GRFTISRD | YVDGVEVHNAKTKPREEQYN | | RPRDLISDIN | GIPARFS | TEQDSKD |
| | NSKNTLYL | STYRVVSVLTVLHQDWLNGK | | VIVLELKGSE | GSGSGTE | STYSLSS |
| | QMNSLRAE | EYKCKVSNKALPAPIEKTIS | | TTFMCEYADE | FTLTISS | TLTLSKA |
| | DTAVYYCA | KAKGQPREPQVYTLPPSREE | | TATIVEFINR | LQSEDFA | DYEKHKV |
| | REEVDWNS | MTKNQVSLTCLVKGFYPSDI | | WITFSQSIIS | VYYCQQY | YACEVTH |
| | YFDLWGQG | AVEWESNGQPENNYKTTPPV | | TLT (SEQ | DTWPPTF | QGLSSPV |
| | TLVTVSS | LDSDGSFFLYSKLTVDKSRW | | ID NO: 41) | GQGTKVE | TKSFNRG |
| | (SEQ ID | QQGNVFSCSVMHEALHNHYT | | | IK (SEQ | EC (SEQ |
| | NO: 846) | QKSLSLSPG (SEQ ID | | | ID NO: | ID NO: |
| | | NO: 44) | | | 847) | 45) |
| MIAB | EVQLLESG | ASTKGPSVFPLAPSSKSTSG | GGGGS | APTSSSTKKT | EIVMTQS | RTVAAPS |
| 106 | GGLVQPGG | GTAALGCLVKDYFPEPVTVS | (SEQ | QLQLEHLLLD | PATLSVS | VFIFPPS |
| | SLRLSCAA | WNSGALTSGVHTFPAVLQSS | ID NO: | LQMILNGINN | PGERATL | DEQLKSG |
| | SGFTFDDY | GLYSLSSVVTVPSSSLGTQT | 23) | YKNPKLTRML | SCRASQS | TASVVCL |
| | AMHWVRQA | YICNVNHKPSNTKVDKKVEP | | TFKFYMPKKA | VGTDLAW | LNNFYPR |
| | PGKGLEWV | KSCDKTHTCPPCPAPEAAGA | | TELKHLQCLE | YQQKPGQ | EAKVQWK |
| | ASITSSSA | PSVFLFPPKPKDTLMISRTP | | EELKPLEEAL | APRLLIY | VDNALQS |
| | FIDYADSV | EVTCVVVDVSHEDPEVKFNW | | NLAPSKNFHL | GASTRAA | GNSQESV |
| | KGRFTISR | YVDGVEVHNAKTKPREEQYN | | RPRDLISDIN | GIPARFS | TEQDSKD |
| | DNSKNTLY | STYRVVSVLTVLHQDWLNGK | | VIVLELKGSE | GSGSGTE | STYSLSS |
| | LQMNSLRA | EYKCKVSNKALPAPIEKTIS | | TTFMCEYADE | FTLTISS | TLTLSKA |
| | EDTAVYYC | KAKGQPREPQVYTLPPSREE | | TATIVEFINR | LQSEDFA | DYEKHKV |
| | ARERVDWN | MTKNQVSLTCLVKGFYPSDI | | WITFSQSIIS | VYYCQQY | YACEVTH |
| | SYFDLWGQ | AVEWESNGQPENNYKTTPPV | | TLT (SEQ | YTYPPTF | QGLSSPV |
| | GTLVTVSS | LDSDGSFFLYSKLTVDKSRW | | ID NO: 41) | GQGTKVE | TKSFNRG |
| | (SEQ ID | QQGNVFSCSVMHEALHNHYT | | | IK (SEQ | EC (SEQ |
| | NO: 664) | QKSLSLSPG (SEQ ID | | | ID NO: | ID NO: |
| | | NO: 44) | | | 848) | 45) |
| MIAB | EVQLLESG | ASTKGPSVFPLAPSSKSTSG | GGGGS | APTSSSTKKT | EIVMTQS | RTVAAPS |
| 107 | GGLVQPGG | GTAALGCLVKDYFPEPVTVS | (SEQ | QLQLEHLLLD | PATLSVS | VFIFPPS |
| | SLRLSCAA | WNSGALTSGVHTFPAVLQSS | ID NO: | LQMILNGINN | PGERATL | DEQLKSG |
| | SGFIFSDY | GLYSLSSVVTVPSSSLGTQT | 23) | YKNPKLTRML | SCRASQS | TASVVCL |
| | AMSWVRQA | YICNVNHKPSNTKVDKKVEP | | TFKFYMPKKA | VDTNLAW | LNNFYPR |
| | PGKGLEWS | KSCDKTHTCPPCPAPEAAGA | | TELKHLQCLE | YQQKPGQ | EAKVQWK |
| | GISGSSGT | PSVFLFPPKPKDTLMISRTP | | EELKPLEEAL | APRLLIY | VDNALQS |
| | IYYADSVK | EVTCVVVDVSHEDPEVKFNW | | NLAPSKNFHL | AASIRAT | GNSQESV |
| | GRFTISRD | YVDGVEVHNAKTKPREEQYN | | RPRDLISDIN | GIPARFS | TEQDSKD |
| | NSKNTLYL | STYRVVSVLTVLHQDWLNGK | | VIVLELKGSE | GSGSGTE | STYSLSS |
| | QMNSLRAE | EYKCKVSNKALPAPIEKTIS | | TTFMCEYADE | FTLTISS | TLTLSKA |
| | DTAVYYCA | KAKGQPREPQVYTLPPSREE | | TATIVEFINR | LQSEDFA | DYEKHKV |
| | YERVDWNS | MTKNQVSLTCLVKGFYPSDI | | WITFSQSIIS | VYYCQQY | YACEVTH |
| | YFDLWGQG | AVEWESNGQPENNYKTTPPV | | TLT (SEQ | KTLPHTF | QGLSSPV |
| | TLVTVSS | LDSDGSFFLYSKLTVDKSRW | | ID NO: 41) | GQGTKVE | TKSFNRG |
| | (SEQ ID | QQGNVFSCSVMHEALHNHYT | | | IK (SEQ | EC (SEQ |
| | NO: 849) | QKSLSLSPG (SEQ ID | | | ID NO: | ID NO: |
| | | NO: 44) | | | 850) | 45) |
| MIAB | EVQLLESG | ASTKGPSVFPLAPSSKSTSG | GGGGS | APTSSSTKKT | EIVMTQS | RTVAAPS |
| 108 | GGLVQPGG | GTAALGCLVKDYFPEPVTVS | (SEQ | QLQLEHLLLD | PATLSVS | VFIFPPS |
| | SLRLSCAA | WNSGALTSGVHTFPAVLQSS | ID NO: | LQMILNGINN | PGERATL | DEQLKSG |
| | SGFTFGSY | GLYSLSSVVTVPSSSLGTQT | 23) | YKNPKLTRML | SCRASQS | TASVVCL |
| | AMSWVRQA | YICNVNHKPSNTKVDKKVEP | | TFKFYMPKKA | VGSDLAW | LNNFYPR |
| | PGKGLEWS | KSCDKTHTCPPCPAPEAAGA | | TELKHLQCLE | YQQKPGQ | EAKVQWK |
| | TISGSGGS | PSVFLFPPKPKDTLMISRTP | | EELKPLEEAL | APRLLIY | VDNALQS |
| | THYADSVK | EVTCVVVDVSHEDPEVKFNW | | NLAPSKNFHL | GVSTRAA | GNSQESV |
| | GRFTISRD | YVDGVEVHNAKTKPREEQYN | | RPRDLISDIN | GIPARFS | TEQDSKD |
| | NSKNTLYL | STYRVVSVLTVLHQDWLNGK | | VIVLELKGSE | GSGSGTE | STYSLSS |
| | QMNSLRAE | EYKCKVSNKALPAPIEKTIS | | TTFMCEYADE | FTLTISS | TLTLSKA |
| | DTAVYYCA | KAKGQPREPQVYTLPPSREE | | TATIVEFINR | LQSEDFA | DYEKHKV |
| | RERVDWGS | MTKNQVSLTCLVKGFYPSDI | | WITFSQSIIS | VYYCQQY | YACEVTH |
| | YFDLWGQG | AVEWESNGQPENNYKTTPPV | | TLT (SEQ | YKWPPTF | QGLSSPV |
| | TLVTVSS | LDSDGSFFLYSKLTVDKSRW | | ID NO: 41) | GQGTKVE | TKSFNRG |
| | (SEQ ID | QQGNVFSCSVMHEALHNHYT | | | IK (SEQ | EC (SEQ |
| | NO: 851) | QKSLSLSPG (SEQ ID | | | ID NO: | ID NO: |
| | | NO: 44) | | | 852) | 45) |
| MIAB | EVQLLESG | ASTKGPSVFPLAPSSKSTSG | GGGGS | APTSSSTKKT | EIVMTQS | RTVAAPS |
| 109 | GGLVQPGG | GTAALGCLVKDYFPEPVTVS | (SEQ | QLQLEHLLLD | PATLSVS | VFIFPPS |
| | SLRLSCAA | WNSGALTSGVHTFPAVLQSS | ID NO: | LQMILNGINN | PGERATL | DEQLKSG |
| | SGFTFDDY | GLYSLSSVVTVPSSSLGTQT | 23) | YKNPKLTRML | SCRACQG | TASVVCL |
| | AMHWVRQA | YICNVNHKPSNTKVDKKVEP | | TFKFYMPKKA | ISNSYLA | LNNFYPR |
| | PGKGLEWV | KSCDKTHTCPPCPAPEAAGA | | TELKHLQCLE | WYQQKPG | EAKVQWK |
| | ASITSSSA | PSVFLFPPKPKDTLMISRTP | | EELKPLEEAL | QAPRLLI | VDNALQS |
| | FIDYADSV | EVTCVVVDVSHEDPEVKFNW | | NLAPSKNFHL | YGASTRG | GNSQESV |
| | KGRFTISR | YVDGVEVHNAKTKPREEQYN | | RPRDLISDIN | TGIPARF | TEQDSKD |
| | DNSKNTLY | STYRVVSVLTVLHQDWLNGK | | VIVLELKGSE | SGSGSGT | STYSLSS |
| | LQMNSLRA | EYKCKVSNKALPAPIEKTIS | | TTFMCEYADE | EFTLTIS | TLTLSKA |
| | EDTAVYYC | KAKGQPREPQVYTLPPSREE | | TATIVEFINR | SLQSEDF | DYEKHKV |
| | ARERVDWN | MTKNQVSLTCLVKGFYPSDI | | WITFSQSIIS | AVYYCQQ | YACEVTH |
| | SYFDLWGQ | AVEWESNGQPENNYKTTPPV | | TLT (SEQ | YYTYPPT | QGLSSPV |
| | GTLVTVSS | LDSDGSFFLYSKLTVDKSRW | | ID NO: 41) | FGQGTKV | TKSFNRG |
| | (SEQ ID | QQGNVFSCSVMHEALHNHYT | | | EIK | EC (SEQ |
| | NO: 664) | QKSLSLSPG (SEQ ID | | | (SEQ ID | ID NO: |
| | | NO: 44) | | | NO: | 45) |
| | | | | | 853) | |
| MIAB | EVQLLESG | ASTKGPSVFPLAPSSKSTSG | GGGGS | APTSSSTKKT | EIVMTQS | RTVAAPS |
| 110 | GGLVQPGG | GTAALGCLVKDYFPEPVTVS | (SEQ | QLQLEHLLLD | PATLSVS | VFIFPPS |
| | SLRLSCAA | WNSGALTSGVHTFPAVLQSS | ID NO: | LQMILNGINN | PGERATL | DEQLKSG |
| | SGFTFSSY | GLYSLSSVVTVPSSSLGTQT | 23) | YKNPKLTRML | SCRASQS | TASVVCL |
| | AMSWVRQA | YICNVNHKPSNTKVDKKVEP | | TFKFYMPKKA | IDTNLAW | LNNFYPR |
| | PGKGLEWS | KSCDKTHTCPPCPAPEAAGA | | TELKHLQCLE | YQQKPGQ | EAKVQWK |
| | AISGSSGS | PSVFLFPPKPKDTLMISRTP | | EELKPLEEAL | APRLLIY | VDNALQS |
| | TYYADSVK | EVTCVVVDVSHEDPEVKFNW | | NLAPSKNFHL | VASTRAT | GNSQESV |
| | GRFTISRD | YVDGVEVHNAKTKPREEQYN | | RPRDLISDIN | GIPARFS | TEQDSKD |
| | NSKNTLYL | STYRVVSVLTVLHQDWLNGK | | VIVLELKGSE | GSGSGTE | STYSLSS |
| | QMNSLRAE | EYKCKVSNKALPAPIEKTIS | | TTFMCEYADE | FTLTISS | TLTLSKA |
| | DTAVYYCA | KAKGQPREPQVYTLPPSREE | | TATIVEFINR | LQSEDFA | DYEKHKV |
| | RERMDWNS | MTKNQVSLTCLVKGFYPSDI | | WITFSQSIIS | VYYCQQY | YACEVTH |
| | YFDLWGQG | AVEWESNGQPENNYKTTPPV | | TLT (SEQ | YSWPKTF | QGLSSPV |
| | TLVTVSS | LDSDGSFFLYSKLTVDKSRW | | ID NO: 41) | GQGTKVE | TKSFNRG |
| | (SEQ ID | QQGNVFSCSVMHEALHNHYT | | | IK (SEQ | EC (SEQ |
| | NO: 854) | QKSLSLSPG (SEQ ID | | | ID NO: | ID NO: |
| | | NO: 44) | | | 855) | 45) |
| MIAB | EVQLLESG | ASTKGPSVFPLAPSSKSTSG | GGGGS | APTSSSTKKT | EIVMTQS | RTVAAPS |
| 111 | GGLVQPGG | GTAALGCLVKDYFPEPVTVS | (SEQ | QLQLEHLLLD | PATLSVS | VFIFPPS |
| | SLRLSCAA | WNSGALTSGVHTFPAVLQSS | ID NO: | LQMILNGINN | PGERATL | DEQLKSG |
| | SGFTFDTY | GLYSLSSVVTVPSSSLGTQT | 23) | YKNPKLTRML | SCRASQS | TASVVCL |
| | AMNWVRQA | YICNVNHKPSNTKVDKKVEP | | TFKFYMPKKA | VSSNIAW | LNNFYPR |
| | PGKGLEWS | KSCDKTHTCPPCPAPEAAGA | | TELKHLQCLE | YQQKPGQ | EAKVQWK |
| | SITGSGVS | PSVFLFPPKPKDTLMISRTP | | EELKPLEEAL | APRLLIY | VDNALQS |
| | TDYADSVK | EVTCVVVDVSHEDPEVKFNW | | NLAPSKNFHL | DASIRAT | GNSQESV |
| | GRFTISRD | YVDGVEVHNAKTKPREEQYN | | RPRDLISDIN | GIPARFS | TEQDSKD |
| | NSKNTLYL | STYRVVSVLTVLHQDWLNGK | | VIVLELKGSE | GSGSGTE | STYSLSS |
| | QMNSLRAE | EYKCKVSNKALPAPIEKTIS | | TTFMCEYADE | FTLTISS | TLTLSKA |
| | DTAVYYCA | KAKGQPREPQVYTLPPSREE | | TATIVEFINR | LQSEDFA | DYEKHKV |
| | RESVDWNS | MTKNQVSLTCLVKGFYPSDI | | WITFSQSIIS | VYYCQQY | YACEVTH |
| | YFDLWGQG | AVEWESNGQPENNYKTTPPV | | TLT (SEQ | NKWPPTF | QGLSSPV |
| | TLVTVSS | LDSDGSFFLYSKLTVDKSRW | | ID NO: 41) | GQGTKVE | TKSFNRG |
| | (SEQ ID | QQGNVFSCSVMHEALHNHYT | | | IK (SEQ | EC (SEQ |
| | NO: 856) | QKSLSLSPG (SEQ ID | | | ID NO: | ID NO: |
| | | NO: 44) | | | 857) | 45) |
| MIAB | EVQLLESG | ASTKGPSVFPLAPSSKSTSG | GGGGS | APTSSSTKKT | EIVMTQS | RTVAAPS |
| 112 | GGLVQPGG | GTAALGCLVKDYFPEPVTVS | (SEQ | QLQLEHLLLD | PATLSVS | VFIFPPS |
| | SLRLSCAA | WNSGALTSGVHTFPAVLQSS | ID NO: | LQMILNGINN | PGERATL | DEQLKSG |
| | SGFTFRTY | GLYSLSSVVTVPSSSLGTQT | 23) | YKNPKLTRML | SCRASQS | TASVVCL |
| | AMSWVRQA | YICNVNHKPSNTKVDKKVEP | | TFKFYMPKKA | VSYKLAW | LNNFYPR |
| | PGKGLEWS | KSCDKTHTCPPCPAPEAAGA | | TELKHLQCLE | YQQKPGQ | EAKVQWK |
| | IITGSGGS | PSVFLFPPKPKDTLMISRTP | | EELKPLEEAL | APRLLIY | VDNALQS |
| | TYYADSVK | EVTCVVVDVSHEDPEVKFNW | | NLAPSKNFHL | AASIRDT | GNSQESV |
| | GRFTISRD | YVDGVEVHNAKTKPREEQYN | | RPRDLISDIN | GIPARFS | TEQDSKD |
| | NSKNTLYL | STYRVVSVLTVLHQDWLNGK | | VIVLELKGSE | GSGSGTE | STYSLSS |
| | QMNSLRAE | EYKCKVSNKALPAPIEKTIS | | TTFMCEYADE | FTLTISS | TLTLSKA |
| | DTAVYYCA | KAKGQPREPQVYTLPPSREE | | TATIVEFINR | LQSEDFA | DYEKHKV |
| | MERVDWNS | MTKNQVSLTCLVKGFYPSDI | | WITFSQSIIS | VYYCQQY | YACEVTH |
| | YFDLWGQG | AVEWESNGQPENNYKTTPPV | | TLT (SEQ | DTWPLTF | QGLSSPV |
| | TLVTVSS | LDSDGSFFLYSKLTVDKSRW | | ID NO: 41) | GQGTKVE | TKSFNRG |
| | (SEQ ID | QQGNVFSCSVMHEALHNHYT | | | IK (SEQ | EC (SEQ |
| | NO: 858) | QKSLSLSPG (SEQ ID | | | ID NO: | ID NO: |
| | | NO: 44) | | | 859) | 45) |
| MIAB | EVQLLESG | ASTKGPSVFPLAPSSKSTSG | GGGGS | APTSSSTKKT | EIVMTQS | RTVAAPS |
| 113 | GGLVQPGG | GTAALGCLVKDYFPEPVTVS | (SEQ | QLQLEHLLLD | PATLSVS | VFIFPPS |
| | SLRLSCAA | WNSGALTSGVHTFPAVLQSS | ID NO: | LQMILNGINN | PGERATL | DEQLKSG |
| | SGFTFSSY | GLYSLSSVVTVPSSSLGTQT | 23) | YKNPKLTRML | SCRASES | TASVVCL |
| | SMTWVRQA | YICNVNHKPSNTKVDKKVEP | | TFKFYMPKKA | VSSNLAW | LNNFYPR |
| | PGKGLEWS | KSCDKTHTCPPCPAPEAAGA | | TELKHLQCLE | YQQKPGQ | EAKVQWK |
| | AISSSGGS | PSVFLFPPKPKDTLMISRTP | | EELKPLEEAL | APRLLIY | VDNALQS |
| | IDYADSVK | EVTCVVVDVSHEDPEVKFNW | | NLAPSKNFHL | DASTRAT | GNSQESV |
| | GRFTISRD | YVDGVEVHNAKTKPREEQYN | | RPRDLISDIN | GIPARFS | TEQDSKD |
| | NSKNTLYL | STYRVVSVLTVLHQDWLNGK | | VIVLELKGSE | GSGSGTE | STYSLSS |
| | QMNSLRAE | EYKCKVSNKALPAPIEKTIS | | TTFMCEYADE | FTLTISS | TLTLSKA |
| | DTAVYYCA | KAKGQPREPQVYTLPPSREE | | TATIVEFINR | LQSEDFA | DYEKHKV |
| | REMVDWNS | MTKNQVSLTCLVKGFYPSDI | | WITFSQSIIS | VYYCQQY | YACEVTH |
| | YFWLWGQG | AVEWESNGQPENNYKTTPPV | | TLT (SEQ | TTWPYTF | QGLSSPV |
| | TLVTVSS | LDSDGSFFLYSKLTVDKSRW | | ID NO: 41) | GQGTKVE | TKSFNRG |
| | (SEQ ID | QQGNVFSCSVMHEALHNHYT | | | IK (SEQ | EC (SEQ |
| | NO: 860) | QKSLSLSPG (SEQ ID | | | ID NO: | ID NO: |
| | | NO: 44) | | | 861) | 45) |
| MIAB | EVQLLESG | ASTKGPSVFPLAPSSKSTSG | GGGGS | APTSSSTKKT | EIVMTQS | RTVAAPS |
| 114 | GGLVQPGG | GTAALGCLVKDYFPEPVTVS | (SEQ | QLQLEHLLLD | PATLSVS | VFIFPPS |
| | SLRLSCAA | WNSGALTSGVHTFPAVLQSS | ID NO: | LQMILNGINN | PGERATL | DEQLKSG |
| | SGFTFRSY | GLYSLSSVVTVPSSSLGTQT | 23) | YKNPKLTRML | SCRASQS | TASVVCL |
| | AMNWVRQA | YICNVNHKPSNTKVDKKVEP | | TFKFYMPKKA | VSTYLAW | LNNFYPR |
| | PGKGLEWS | KSCDKTHTCPPCPAPEAAGA | | TELKHLQCLE | YQQKPGQ | EAKVQWK |
| | VISGSGGS | PSVFLFPPKPKDTLMISRTP | | EELKPLEEAL | APRLLIY | VDNALQS |
| | TYYADSVK | EVTCVVVDVSHEDPEVKFNW | | NLAPSKNFHL | DASTTAT | GNSQESV |
| | GRFTISRD | YVDGVEVHNAKTKPREEQYN | | RPRDLISDIN | GIPARFS | TEQDSKD |
| | NSKNTLYL | STYRVVSVLTVLHQDWLNGK | | VIVLELKGSE | GSGSGTE | STYSLSS |
| | QMNSLRAE | EYKCKVSNKALPAPIEKTIS | | TTFMCEYADE | FTLTISS | TLTLSKA |
| | DTAVYYCA | KAKGQPREPQVYTLPPSREE | | TATIVEFINR | LQSEDFA | DYEKHKV |
| | RERVDWNS | MTKNQVSLTCLVKGFYPSDI | | WITFSQSIIS | VYYCQQY | YACEVTH |
| | YFDLWGQG | AVEWESNGQPENNYKTTPPV | | TLT (SEQ | DTWPFTF | QGLSSPV |
| | TLVTVSS | LDSDGSFFLYSKLTVDKSRW | | ID NO: 41) | GQGTKVE | TKSFNRG |
| | (SEQ ID | QQGNVFSCSVMHEALHNHYT | | | IK (SEQ | EC (SEQ |
| | NO: 862) | QKSLSLSPG (SEQ ID | | | ID NO: | ID NO: |
| | | NO: 44) | | | 863) | 45) |
| MIAB | EVQLLESG | ASTKGPSVFPLAPSSKSTSG | GGGGS | APTSSSTKKT | EIVMTQS | RTVAAPS |
| 115 | GGLVQPGG | GTAALGCLVKDYFPEPVTVS | (SEQ | QLQLEHLLLD | PATLSVS | VFIFPPS |
| | SLRLSCAA | WNSGALTSGVHTFPAVLQSS | ID NO: | LQMILNGINN | PGERATL | DEQLKSG |
| | SGFTFDDY | GLYSLSSVVTVPSSSLGTQT | 23) | YKNPKLTRML | SCRASQS | TASVVCL |
| | AMHWVRQA | YICNVNHKPSNTKVDKKVEP | | TFKFYMPKKA | ISSHLAW | LNNFYPR |
| | PGKGLEWV | KSCDKTHTCPPCPAPEAAGA | | TELKHLQCLE | YQQKPGQ | EAKVQWK |
| | ASITSSSA | PSVFLFPPKPKDTLMISRTP | | EELKPLEEAL | APRLLIY | VDNALQS |
| | FIDYADSV | EVTCVVVDVSHEDPEVKFNW | | NLAPSKNFHL | GASSRAS | GNSQESV |
| | KGRFTISR | YVDGVEVHNAKTKPREEQYN | | RPRDLISDIN | GIPARFS | TEQDSKD |
| | DNSKNTLY | STYRVVSVLTVLHQDWLNGK | | VIVLELKGSE | GSGSGTE | STYSLSS |
| | LQMNSLRA | EYKCKVSNKALPAPIEKTIS | | TTFMCEYADE | FTLTISS | TLTLSKA |
| | EDTAVYYC | KAKGQPREPQVYTLPPSREE | | TATIVEFINR | LQSEDFA | DYEKHKV |
| | ARERVDWN | MTKNQVSLTCLVKGFYPSDI | | WITFSQSIIS | VYYCQQY | YACEVTH |
| | SYFDLWGQ | AVEWESNGQPENNYKTTPPV | | TLT (SEQ | NIWPPTF | QGLSSPV |
| | GTLVTVSS | LDSDGSFFLYSKLTVDKSRW | | ID NO: 41) | GQGTKVE | TKSFNRG |
| | (SEQ ID | QQGNVFSCSVMHEALHNHYT | | | IK (SEQ | EC (SEQ |
| | NO: 664) | QKSLSLSPG (SEQ ID | | | ID NO: | ID NO: |
| | | NO: 44) | | | 864) | 45) |
| MIAB | EVQLLESG | ASTKGPSVFPLAPSSKSTSG | GGGGS | APTSSSTKKT | EIVMTQS | RTVAAPS |
| 116 | GGLVQPGG | GTAALGCLVKDYFPEPVTVS | (SEQ | QLQLEHLLLD | PATLSVS | VFIFPPS |
| | SLRLSCAA | WNSGALTSGVHTFPAVLQSS | ID NO: | LQMILNGINN | PGERATL | DEQLKSG |
| | SGFTFSDY | GLYSLSSVVTVPSSSLGTQT | 23) | YKNPKLTRML | SCRASRS | TASVVCL |
| | AMNWVRQA | YICNVNHKPSNTKVDKKVEP | | TFKFYMPKKA | VSSNLAW | LNNFYPR |
| | PGKGLEWS | KSCDKTHTCPPCPAPEAAGA | | TELKHLQCLE | YQQKPGQ | EAKVQWK |
| | AISGTGGT | PSVFLFPPKPKDTLMISRTP | | EELKPLEEAL | APRLLIY | VDNALQS |
| | TYYADSVK | EVTCVVVDVSHEDPEVKFNW | | NLAPSKNFHL | GGSTRAT | GNSQESV |
| | GRFTISRD | YVDGVEVHNAKTKPREEQYN | | RPRDLISDIN | GIPARFS | TEQDSKD |
| | NSKNTLYL | STYRVVSVLTVLHQDWLNGK | | VIVLELKGSE | GSGSGTE | STYSLSS |
| | QMNSLRAE | EYKCKVSNKALPAPIEKTIS | | TTFMCEYADE | FTLTISS | TLTLSKA |
| | DTAVYYCA | KAKGQPREPQVYTLPPSREE | | TATIVEFINR | LQSEDFA | DYEKHKV |
| | RERVDWNS | MTKNQVSLTCLVKGFYPSDI | | WITFSQSIIS | VYYCQQY | YACEVTH |
| | WFDLWGQG | AVEWESNGQPENNYKTTPPV | | TLT (SEQ | YVWPPTF | QGLSSPV |
| | TLVTVSS | LDSDGSFFLYSKLTVDKSRW | | ID NO: 41) | GQGTKVE | TKSFNRG |
| | (SEQ ID | QQGNVFSCSVMHEALHNHYT | | | IK (SEQ | EC (SEQ |
| | NO: 865) | QKSLSLSPG (SEQ ID | | | ID NO: | ID NO: |
| | | NO: 44) | | | 866) | 45) |
| MIAB | EVQLLESG | ASTKGPSVFPLAPSSKSTSG | GGGGS | APTSSSTKKT | EIVMTQS | RTVAAPS |
| 117 | GGLVQPGG | GTAALGCLVKDYFPEPVTVS | (SEQ | QLQLEHLLLD | PATLSVS | VFIFPPS |
| | SLRLSCAA | WNSGALTSGVHTFPAVLQSS | ID NO: | LQMILNGINN | PGERATL | DEQLKSG |
| | SGFSFSTY | GLYSLSSVVTVPSSSLGTQT | 23) | YKNPKLTRML | SCRAGQS | TASVVCL |
| | AMTWVRQA | YICNVNHKPSNTKVDKKVEP | | TFKFYMPKKA | VSNNLAW | LNNFYPR |
| | PGKGLEWS | KSCDKTHTCPPCPAPEAAGA | | TELKHLQCLE | YQQKPGQ | EAKVQWK |
| | TISGSGVN | PSVFLFPPKPKDTLMISRTP | | EELKPLEEAL | APRLLIY | VDNALQS |
| | TYYADSVK | EVTCVVVDVSHEDPEVKFNW | | NLAPSKNFHL | GASPRAT | GNSQESV |
| | GRFTISRD | YVDGVEVHNAKTKPREEQYN | | RPRDLISDIN | GIPARFS | TEQDSKD |
| | NSKNTLYL | STYRVVSVLTVLHQDWLNGK | | VIVLELKGSE | GSGSGTE | STYSLSS |
| | QMNSLRAE | EYKCKVSNKALPAPIEKTIS | | TTFMCEYADE | FTLTISS | TLTLSKA |
| | DTAVYYCA | KAKGQPREPQVYTLPPSREE | | TATIVEFINR | LQSEDFA | DYEKHKV |
| | RERVDWNS | MTKNQVSLTCLVKGFYPSDI | | WITFSQSIIS | VYYCQQY | YACEVTH |
| | EFDLWGQG | AVEWESNGQPENNYKTTPPV | | TLT (SEQ | DTSPLTF | QGLSSPV |
| | TLVTVSS | LDSDGSFFLYSKLTVDKSRW | | ID NO: 41) | GQGTKVE | TKSFNRG |
| | (SEQ ID | QQGNVFSCSVMHEALHNHYT | | | IK (SEQ | EC (SEQ |
| | NO: 867) | QKSLSLSPG (SEQ ID | | | ID NO: | ID NO: |
| | | NO: 44 | | | 868) | 45) |
| MIAB | EVQLLESG | ASTKGPSVFPLAPSSKSTSG | GGGGS | APTSSSTKKT | EIVMTQS | RTVAAPS |
| 118 | GGLVQPGG | GTAALGCLVKDYFPEPVTVS | (SEQ | QLQLEHLLLD | PATLSVS | VFIFPPS |
| | SLRLSCAA | WNSGALTSGVHTFPAVLQSS | ID NO: | LQMILNGINN | PGERATL | DEQLKSG |
| | SGFSFGSY | GLYSLSSVVTVPSSSLGTQT | 23) | YKNPKLTRML | SCRASQS | TASVVCL |
| | AMGWVRQA | YICNVNHKPSNTKVDKKVEP | | TFKFYMPKKA | VTRNLAW | LNNFYPR |
| | PGKGLEWS | KSCDKTHTCPPCPAPEAAGA | | TELKHLQCLE | YQQKPGQ | EAKVQWK |
| | IISSSGAF | PSVFLFPPKPKDTLMISRTP | | EELKPLEEAL | APRLLIY | VDNALQS |
| | TYYADSVK | EVTCVVVDVSHEDPEVKFNW | | NLAPSKNFHL | GASSRAA | GNSQESV |
| | GRFTISRD | YVDGVEVHNAKTKPREEQYN | | RPRDLISDIN | GIPARFS | TEQDSKD |
| | NSKNTLYL | STYRVVSVLTVLHQDWLNGK | | VIVLELKGSE | GSGSGTE | STYSLSS |
| | QMNSLRAE | EYKCKVSNKALPAPIEKTIS | | TTFMCEYADE | FTLTISS | TLTLSKA |
| | DTAVYYCA | KAKGQPREPQVYTLPPSREE | | TATIVEFINR | LQSEDFA | DYEKHKV |
| | RERLDWNS | MTKNQVSLTCLVKGFYPSDI | | WITFSQSIIS | VYYCQQY | YACEVTH |
| | YFDLWGQG | AVEWESNGQPENNYKTTPPV | | TLT (SEQ | YNWPPTF | QGLSSPV |
| | TLVTVSS | LDSDGSFFLYSKLTVDKSRW | | ID NO: 41) | GQGTKVE | TKSFNRG |
| | (SEQ ID | QQGNVFSCSVMHEALHNHYT | | | IK (SEQ | EC (SEQ |
| | NO: 869) | QKSLSLSPG (SEQ ID | | | ID NO: | ID NO: |
| | | NO: 44) | | | 870) | 45) |
| MIAB | EVQLLESG | ASTKGPSVFPLAPSSKSTSG | GGGGS | APTSSSTKKT | EIVMTQS | RTVAAPS |
| 119 | GGLVQPGG | GTAALGCLVKDYFPEPVTVS | (SEQ | QLQLEHLLLD | PATLSVS | VFIFPPS |
| | SLRLSCAA | WNSGALTSGVHTFPAVLQSS | ID NO: | LQMILNGINN | PGERATL | DEQLKSG |
| | SGFSFSTY | GLYSLSSVVTVPSSSLGTQT | 23) | YKNPKLTRML | SCRASQS | TASVVCL |
| | AMHWVRQA | YICNVNHKPSNTKVDKKVEP | | TFKFYMPKKA | VTTNLAW | LNNFYPR |
| | PGKGLEWS | KSCDKTHTCPPCPAPEAAGA | | TELKHLQCLE | YQQKPGQ | EAKVQWK |
| | AISGGGGS | PSVFLFPPKPKDTLMISRTP | | EELKPLEEAL | APRLLIY | VDNALQS |
| | TFYADSVK | EVTCVVVDVSHEDPEVKFNW | | NLAPSKNFHL | GASTRAN | GNSQESV |
| | GRFTISRD | YVDGVEVHNAKTKPREEQYN | | RPRDLISDIN | GIPARFS | TEQDSKD |
| | NSKNTLYL | STYRVVSVLTVLHQDWLNGK | | VIVLELKGSE | GSGSGTE | STYSLSS |
| | QMNSLRAE | EYKCKVSNKALPAPIEKTIS | | TTFMCEYADE | FTLTISS | TLTLSKA |
| | DTAVYYCA | KAKGQPREPQVYTLPPSREE | | TATIVEFINR | LQSEDFA | DYEKHKV |
| | RERVDWNS | MTKNQVSLTCLVKGFYPSDI | | WITFSQSIIS | VYYCQQY | YACEVTH |
| | TFDLWGQG | AVEWESNGQPENNYKTTPPV | | TLT (SEQ | HKWPPTF | QGLSSPV |
| | TLVTVSS | LDSDGSFFLYSKLTVDKSRW | | ID NO: 41) | GQGTKVE | TKSFNRG |
| | (SEQ ID | QQGNVFSCSVMHEALHNHYT | | | IK (SEQ | EC (SEQ |
| | NO: 871) | QKSLSLSPG (SEQ ID | | | ID NO: | ID NO: |
| | | NO: 44) | | | 872) | 45) |
| MIAB | EVQLLESG | ASTKGPSVFPLAPSSKSTSG | GGGGS | APTSSSTKKT | EIVMTQS | RTVAAPS |
| 120 | GGLVQPGG | GTAALGCLVKDYFPEPVTVS | (SEQ | QLQLEHLLLD | PATLSVS | VFIFPPS |
| | SLRLSCAA | WNSGALTSGVHTFPAVLQSS | ID NO: | LQMILNGINN | PGERATL | DEQLKSG |
| | SGFTFDDY | GLYSLSSVVTVPSSSLGTQT | 23) | YKNPKLTRML | SCRASQN | TASVVCL |
| | AMHWVRQA | YICNVNHKPSNTKVDKKVEP | | TFKFYMPKKA | VNNNLAW | LNNFYPR |
| | PGKGLEWV | KSCDKTHTCPPCPAPEAAGA | | TELKHLQCLE | YQQKPGQ | EAKVQWK |
| | ASITSSSA | PSVFLFPPKPKDTLMISRTP | | EELKPLEEAL | APRLLIY | VDNALQS |
| | FIDYADSV | EVTCVVVDVSHEDPEVKFNW | | NLAPSKNFHL | DATTRAT | GNSQESV |
| | KGRFTISR | YVDGVEVHNAKTKPREEQYN | | RPRDLISDIN | GIPARFS | TEQDSKD |
| | DNSKNTLY | STYRVVSVLTVLHQDWLNGK | | VIVLELKGSE | GSGSGTE | STYSLSS |
| | LQMNSLRA | EYKCKVSNKALPAPIEKTIS | | TTFMCEYADE | FTLTISS | TLTLSKA |
| | EDTAVYYC | KAKGQPREPQVYTLPPSREE | | TATIVEFINR | LQSEDFA | DYEKHKV |
| | AREPVLWN | MTKNQVSLTCLVKGFYPSDI | | WITFSQSIIS | VYYCQQY | YACEVTH |
| | SYFDLWGQ | AVEWESNGQPENNYKTTPPV | | TLT (SEQ | YHWPQTF | QGLSSPV |
| | GTLVTVSS | LDSDGSFFLYSKLTVDKSRW | | ID NO: 41) | GQGTKVE | TKSFNRG |
| | (SEQ ID | QQGNVFSCSVMHEALHNHYT | | | IK (SEQ | EC (SEQ |
| | NO: 873) | QKSLSLSPG (SEQ ID | | | ID NO: | ID NO: |
| | | NO: 44) | | | 677) | 45) |
| MIAB | EVQLLESG | ASTKGPSVFPLAPSSKSTSG | GGGGS | APTSSSTKKT | EIVMTQS | RTVAAPS |
| 121 | GGLVQPGG | GTAALGCLVKDYFPEPVTVS | (SEQ | QLQLEHLLLD | PATLSVS | VFIFPPS |
| | SLRLSCAA | WNSGALTSGVHTFPAVLQSS | ID NO: | LQMILNGINN | PGERATL | DEQLKSG |
| | SGFIFDDY | GLYSLSSVVTVPSSSLGTQT | 23) | YKNPKLTRML | SCRACPS | TASVVCL |
| | AMHWVRQA | YICNVNHKPSNTKVDKKVEP | | TFKFYMPKKA | VSNNLVW | LNNFYPR |
| | PGKGLEWV | KSCDKTHTCPPCPAPEAAGA | | TELKHLQCLE | YQQKPGQ | EAKVQWK |
| | ASITSSSA | PSVFLFPPKPKDTLMISRTP | | EELKPLEEAL | APRLLIY | VDNALQS |
| | FIDYADSV | EVTCVVVDVSHEDPEVKFNW | | NLAPSKNFHL | DASTRAT | GNSQESV |
| | KGRFTISR | YVDGVEVHNAKTKPREEQYN | | RPRDLISDIN | GIPARFS | TEQDSKD |
| | DNSKNTLY | STYRVVSVLTVLHQDWLNGK | | VIVLELKGSE | GSGSGTE | STYSLSS |
| | LQMNSLRA | EYKCKVSNKALPAPIEKTIS | | TTFMCEYADE | FTLTISS | TLTLSKA |
| | EDTAVYYC | KAKGQPREPQVYTLPPSREE | | TATIVEFINR | LQSEDFA | DYEKHKV |
| | ARERVDWF | MTKNQVSLTCLVKGFYPSDI | | WITFSQSIIS | VYYCQQY | YACEVTH |
| | SYFDLWGQ | AVEWESNGQPENNYKTTPPV | | TLT (SEQ | SHWPPTF | QGLSSPV |
| | GTLVTVSS | LDSDGSFFLYSKLTVDKSRW | | ID NO: 41) | GQGTKVE | TKSFNRG |
| | (SEQ ID | QQGNVFSCSVMHEALHNHYT | | | IK (SEQ | EC (SEQ |
| | NO: 688) | QKSLSLSPG (SEQ ID | | | ID NO: | ID NO: |
| | | NO: 44) | | | 874) | 45) |
| MIAB | EVQLLESG | ASTKGPSVFPLAPSSKSTSG | GGGGS | APTSSSTKKT | EIVMTQS | RTVAAPS |
| 122 | GGLVQPGG | GTAALGCLVKDYFPEPVTVS | (SEQ | QLQLEHLLLD | PATLSVS | VFIFPPS |
| | SLRLSCAA | WNSGALTSGVHTFPAVLQSS | ID NO: | LQMILNGINN | PGERATL | DEQLKSG |
| | SGFIFDDY | GLYSLSSVVTVPSSSLGTQT | 23) | YKNPKLTRML | SCRACPS | TASVVCL |
| | AMHWVRQA | YICNVNHKPSNTKVDKKVEP | | TFKFYMPKKA | VSNNYLV | LNNFYPR |
| | PGKGLEWV | KSCDKTHTCPPCPAPEAAGA | | TELKHLQCLE | WYQQKPG | EAKVQWK |
| | ASITSSSA | PSVFLFPPKPKDTLMISRTP | | EELKPLEEAL | QAPRLLI | VDNALQS |
| | FIDYADSV | EVTCVVVDVSHEDPEVKFNW | | NLAPSKNFHL | YDASTRA | GNSQESV |
| | KGRFTISR | YVDGVEVHNAKTKPREEQYN | | RPRDLISDIN | TGIPARF | TEQDSKD |
| | DNSKNTLY | STYRVVSVLTVLHQDWLNGK | | VIVLELKGSE | SGSGSGT | STYSLSS |
| | LQMNSLRA | EYKCKVSNKALPAPIEKTIS | | TTFMCEYADE | EFTLTIS | TLTLSKA |
| | EDTAVYYC | KAKGQPREPQVYTLPPSREE | | TATIVEFINR | SLQSEDF | DYEKHKV |
| | ARERVDWE | MTKNQVSLTCLVKGFYPSDI | | WITFSQSIIS | AVYYCQQ | YACEVTH |
| | SYFDLWGQ | AVEWESNGQPENNYKTTPPV | | TLT (SEQ | YSHWPPT | QGLSSPV |
| | GTLVTVSS | LDSDGSFFLYSKLTVDKSRW | | ID NO: 41) | FGQGTKV | TKSFNRG |
| | (SEQ ID | QQGNVFSCSVMHEALHNHYT | | | EIK | EC (SEQ |
| | NO: 688) | QKSLSLSPG (SEQ ID | | | (SEQ ID | ID NO: |
| | | NO: 44) | | | NO: | 45) |
| | | | | | 875) | |
| MIAB | EVQLLESG | ASTKGPSVFPLAPSSKSTSG | GGGGS | APTSSSTKKT | EIVMTQS | RTVAAPS |
| 123 | GGLVQPGG | GTAALGCLVKDYFPEPVTVS | (SEQ | QLQLEHLLLD | PATLSVS | VFIFPPS |
| | SLRLSCAA | WNSGALTSGVHTFPAVLQSS | ID NO: | LQMILNGINN | PGERATL | DEQLKSG |
| | SGFIFDDY | GLYSLSSVVTVPSSSLGTQT | 23) | YKNPKLTRML | SCRASQS | TASVVCL |
| | AMHWVRQA | YICNVNHKPSNTKVDKKVEP | | TFKFYMPKKA | VSNNYLV | LNNFYPR |
| | PGKGLEWV | KSCDKTHTCPPCPAPEAAGA | | TELKHLQCLE | WYQQKPG | EAKVQWK |
| | ASITSSSA | PSVFLFPPKPKDTLMISRTP | | EELKPLEEAL | QAPRLLI | VDNALQS |
| | FIDYADSV | EVTCVVVDVSHEDPEVKFNW | | NLAPSKNFHL | YDASTRA | GNSQESV |
| | KGRFTISR | YVDGVEVHNAKTKPREEQYN | | RPRDLISDIN | TGIPARF | TEQDSKD |
| | DNSKNTLY | STYRVVSVLTVLHQDWLNGK | | VIVLELKGSE | SGSGSGT | STYSLSS |
| | LQMNSLRA | EYKCKVSNKALPAPIEKTIS | | TTFMCEYADE | EFTLTIS | TLTLSKA |
| | EDTAVYYC | KAKGQPREPQVYTLPPSREE | | TATIVEFINR | SLQSEDF | DYEKHKV |
| | ARERVDWF | MTKNQVSLTCLVKGFYPSDI | | WITFSQSIIS | AVYYCQQ | YACEVTH |
| | SYFDLWGQ | AVEWESNGQPENNYKTTPPV | | TLT (SEQ | YSHWPPT | QGLSSPV |
| | GTLVTVSS | LDSDGSFFLYSKLTVDKSRW | | ID NO: 41) | FGQGTKV | TKSFNRG |
| | (SEQ ID | QQGNVFSCSVMHEALHNHYT | | | EIK | EC (SEQ |
| | NO: 688) | QKSLSLSPG (SEQ ID | | | (SEQ ID | ID NO: |
| | | NO: 44) | | | NO: | 45) |
| | | | | | 876) | |
| MIAB | EVQLLESG | ASTKGPSVFPLAPSSKSTSG | GGGGS | APTSSSTKKT | EIVMTQS | RTVAAPS |
| 124 | GGLVQPGG | GTAALGCLVKDYFPEPVTVS | (SEQ | QLQLEHLLLD | PATLSVS | VFIFPPS |
| | SLRLSCAA | WNSGALTSGVHTFPAVLQSS | ID NO: | LQMILNGINN | PGERATL | DEQLKSG |
| | SGFTFSTD | GLYSLSSVVTVPSSSLGTQT | 23) | YKNPKLTRML | SCRASQS | TASVVCL |
| | AMSWVRQA | YICNVNHKPSNTKVDKKVEP | | TFKFYMPKKA | VNNKLAW | LNNFYPR |
| | PGKGLEWS | KSCDKTHTCPPCPAPEAAGA | | TELKHLQCLE | YQQKPGQ | EAKVQWK |
| | AISGSGGS | PSVFLFPPKPKDTLMISRTP | | EELKPLEEAL | APRLLIY | VDNALQS |
| | TYSADSVK | EVTCVVVDVSHEDPEVKFNW | | NLAPSKNFHL | AASTRAT | GNSQESV |
| | GRFTISRD | YVDGVEVHNAKTKPREEQYN | | RPRDLISDIN | GIPARFS | TEQDSKD |
| | NSKNTLYL | STYRVVSVLTVLHQDWLNGK | | VIVLELKGSE | GSGSGTE | STYSLSS |
| | QMNSLRAE | EYKCKVSNKALPAPIEKTIS | | TTFMCEYADE | FTLTISS | TLTLSKA |
| | DTAVYYCA | KAKGQPREPQVYTLPPSREE | | TATIVEFINR | LQSEDFA | DYEKHKV |
| | RARVDWNS | MTKNQVSLTCLVKGFYPSDI | | WITFSQSIIS | VYYCQQY | YACEVTH |
| | YNDLWGQG | AVEWESNGQPENNYKTTPPV | | TLT (SEQ | STWPITE | QGLSSPV |
| | TLVTVSS | LDSDGSFFLYSKLTVDKSRW | | ID NO: 41) | GQGTKVE | TKSFNRG |
| | (SEQ ID | QQGNVFSCSVMHEALHNHYT | | | IK (SEQ | EC (SEQ |
| | NO: 877) | QKSLSLSPG (SEQ ID | | | ID NO: | ID NO: |
| | | NO: 44) | | | 878) | 45) |
| MIAB | EVQLLESG | ASTKGPSVFPLAPSSKSTSG | GGGGS | APTSSSTKKT | EIVMTQS | RTVAAPS |
| 125 | GGLVQPGG | GTAALGCLVKDYFPEPVTVS | (SEQ | QLQLEHLLLD | PATLSVS | VFIFPPS |
| | SLRLSCAA | WNSGALTSGVHTFPAVLQSS | ID NO: | LQMILNGINN | PGERATL | DEQLKSG |
| | SGFTFSNY | GLYSLSSVVTVPSSSLGTQT | 23) | YKNPKLTRML | SCRASQG | TASVVCL |
| | AISWVRQA | YICNVNHKPSNTKVDKKVEP | | TFKFYMPKKA | ISNSYLA | LNNFYPR |
| | PGKGLEWS | KSCDKTHTCPPCPAPEAAGA | | TELKHLQCLE | WYQQKPG | EAKVQWK |
| | DISGSGGT | PSVFLFPPKPKDTLMISRTP | | EELKPLEEAL | QAPRLLI | VDNALQS |
| | TYYADSVK | EVTCVVVDVSHEDPEVKFNW | | NLAPSKNFHL | YGASTRA | GNSQESV |
| | GRFTISRD | YVDGVEVHNAKTKPREEQYN | | RPRDLISDIN | TGIPARF | TEQDSKD |
| | NSKNTLYL | STYRVVSVLTVLHQDWLNGK | | VIVLELKGSE | SGSGSGT | STYSLSS |
| | QMNSLRAE | EYKCKVSNKALPAPIEKTIS | | TTFMCEYADE | EFTLTIS | TLTLSKA |
| | DTAVYYCA | KAKGQPREPQVYTLPPSREE | | TATIVEFINR | SLQSEDF | DYEKHKV |
| | RERVDWNS | MTKNQVSLTCLVKGFYPSDI | | WITFSQSIIS | AVYYCQQ | YACEVTH |
| | YFDLWGQG | AVEWESNGQPENNYKTTPPV | | TLT (SEQ | YYTYPPT | QGLSSPV |
| | TLVTVSS | LDSDGSFFLYSKLTVDKSRW | | ID NO: 41) | FGQGTKV | TKSFNRG |
| | (SEQ ID | QQGNVFSCSVMHEALHNHYT | | | EIK | EC (SEQ |
| | NO: 879) | QKSLSLSPG (SEQ ID | | | (SEQ ID | ID NO: |
| | | NO: 44) | | | NO: | 45) |
| | | | | | 663) | |
| MIAB | EVQLLESG | ASTKGPSVFPLAPSSKSTSG | GGGGS | APTSSSTKKT | EIVMTQS | RTVAAPS |
| 126 | GGLVQPGG | GTAALGCLVKDYFPEPVTVS | (SEQ | QLQLEHLLLD | PATLSVS | VFIFPPS |
| | SLRLSCAA | WNSGALTSGVHTFPAVLQSS | ID NO: | LQMILNGINN | PGERATL | DEQLKSG |
| | SGFTFDDY | GLYSLSSVVTVPSSSLGTQT | 23) | YKNPKLTRML | SCRASQG | TASVVCL |
| | AMHWVRQA | YICNVNHKPSNTKVDKKVEP | | TFKFYMPKKA | ISNSYLA | LNNFYPR |
| | PGKGLEWV | KSCDKTHTCPPCPAPEAAGA | | TELKHLQCLE | WYQQKPG | EAKVQWK |
| | ASITSSSA | PSVFLFPPKPKDTLMISRTP | | EELKPLEEAL | QAPRLLI | VDNALQS |
| | FIDYADSV | EVTCVVVDVSHEDPEVKFNW | | NLAPSKNFHL | YGASTRA | GNSQESV |
| | KGRFTISR | YVDGVEVHNAKTKPREEQYN | | RPRDLISDIN | TGIPARF | TEQDSKD |
| | DNSKNTLY | STYRVVSVLTVLHQDWLNGK | | VIVLELKGSE | SGSGSGT | STYSLSS |
| | LQMNSLRA | EYKCKVSNKALPAPIEKTIS | | TTFMCEYADE | EFTLTIS | TLTLSKA |
| | EDTAVYYC | KAKGQPREPQVYTLPPSREE | | TATIVEFINR | SLQSEDF | DYEKHKV |
| | ARERVDWM | MTKNQVSLTCLVKGFYPSDI | | WITFSQSIIS | AVYYCQQ | YACEVTH |
| | SYFDLWGQ | AVEWESNGQPENNYKTTPPV | | TLT (SEQ | YYTYPPT | QGLSSPV |
| | GTLVTVSS | LDSDGSFFLYSKLTVDKSRW | | ID NO: 41) | FGQGTKV | TKSFNRG |
| | (SEQ ID | QQGNVFSCSVMHEALHNHYT | | | EIK | EC (SEQ |
| | NO: 880) | QKSLSLSPG (SEQ ID | | | (SEQ ID | ID NO: |
| | | NO: 44) | | | NO: | 45) |
| | | | | | 663) | |
| MIAB | EVQLLESG | ASTKGPSVFPLAPSSKSTSG | GGGGS | APTSSSTKKT | EIVMTQS | RTVAAPS |
| 127 | GGLVQPGG | GTAALGCLVKDYFPEPVTVS | (SEQ | QLQLEHLLLD | PATLSVS | VFIFPPS |
| | SLRLSCAA | WNSGALTSGVHTFPAVLQSS | ID NO: | LQMILNGINN | PGERATL | DEQLKSG |
| | SGFTFSNY | GLYSLSSVVTVPSSSLGTQT | 23) | YKNPKLTRML | SCRASQS | TASVVCL |
| | GMTWVRQA | YICNVNHKPSNTKVDKKVEP | | TFKFYMPKKA | VTSKLAW | LNNFYPR |
| | PGKGLEWS | KSCDKTHTCPPCPAPEAAGA | | TELKHLQCLE | YQQKPGQ | EAKVQWK |
| | SIGGSGGS | PSVFLFPPKPKDTLMISRTP | | EELKPLEEAL | APRLLIY | VDNALQS |
| | TYYADSVK | EVTCVVVDVSHEDPEVKFNW | | NLAPSKNFHL | DASTGAT | GNSQESV |
| | GRFTISRD | YVDGVEVHNAKTKPREEQYN | | RPRDLISDIN | GIPARFS | TEQDSKD |
| | NSKNTLYL | STYRVVSVLTVLHQDWLNGK | | VIVLELKGSE | GSGSGTE | STYSLSS |
| | QMNSLRAE | EYKCKVSNKALPAPIEKTIS | | TTFMCEYADE | FTLTISS | TLTLSKA |
| | DTAVYYCA | KAKGQPREPQVYTLPPSREE | | TATIVEFINR | LQSEDFA | DYEKHKV |
| | RKRVDWIS | MTKNQVSLTCLVKGFYPSDI | | WITFSQSIIS | VYYCQQY | YACEVTH |
| | YFDLWGQG | AVEWESNGQPENNYKTTPPV | | TLT (SEQ | YDIPETE | QGLSSPV |
| | TLVTVSS | LDSDGSFFLYSKLTVDKSRW | | ID NO: 41) | GQGTKVE | TKSFNRG |
| | (SEQ ID | QQGNVFSCSVMHEALHNHYT | | | IK (SEQ | EC (SEQ |
| | NO: 881) | QKSLSLSPG (SEQ ID | | | ID NO: | ID NO: |
| | | NO: 44) | | | 882) | 45) |
| MIAB | EVQLLESG | ASTKGPSVFPLAPSSKSTSG | GGGGS | APTSSSTKKT | DIQMTQS | RTVAAPS |
| 128 | GGLVQPGG | GTAALGCLVKDYFPEPVTVS | (SEQ | QLQLEHLLLD | PSSLSAS | VFIFPPS |
| | SLRLSCAA | WNSGALTSGVHTFPAVLQSS | ID NO: | LQMILNGINN | VGDRVTI | DEQLKSG |
| | SGFTFSDF | GLYSLSSVVTVPSSSLGTQT | 23) | YKNPKLTRML | TCRASQS | TASVVCL |
| | WMHWVRQA | YICNVNHKPSNTKVDKKVEP | | TFKFYMPKKA | VSRSLAW | LNNFYPR |
| | PGKGLEWI | KSCDKTHTCPPCPAPEAAGA | | TELKHLQCLE | YQQKPGK | EAKVQWK |
| | SYISGDSG | PSVFLFPPKPKDTLMISRTP | | EELKPLEEAL | APKLLIY | VDNALQS |
| | YTNYADSV | EVTCVVVDVSHEDPEVKFNW | | NLAPSKNFHL | AASSLQS | GNSQESV |
| | KGRFTISR | YVDGVEVHNAKTKPREEQYN | | RPRDLISDIN | GVPSRFS | TEQDSKD |
| | DNSKNTLY | STYRVVSVLTVLHQDWLNGK | | VIVLELKGSE | GSGSGTD | STYSLSS |
| | LQMNSLRA | EYKCKVSNKALPAPIEKTIS | | TTFMCEYADE | FTLTISS | TLTLSKA |
| | EDTAVYYC | KAKGQPREPQVYTLPPSREE | | TATIVEFINR | LQPEDFA | DYEKHKV |
| | ARDRPNYY | MTKNQVSLTCLVKGFYPSDI | | WITFSQSIIS | TYYCQQY | YACEVTH |
| | YMDVWGKG | AVEWESNGQPENNYKTTPPV | | TLT (SEQ | KSYPVTF | QGLSSPV |
| | TTVTVSS | LDSDGSFFLYSKLTVDKSRW | | ID NO: 41) | GQGTKVE | TKSFNRG |
| | (SEQ ID | QQGNVFSCSVMHEALHNHYT | | | IK (SEQ | EC (SEQ |
| | NO: | QKSLSLSPG (SEQ ID | | | ID NO: | ID NO: |
| | 1346) | NO: 44) | | | 592) | 45) |
| MIAB | EVQLLESG | ASTKGPSVFPLAPSSKSTSG | GGGGS | APTSSSTKKT | DIQMTQS | RTVAAPS |
| 128A | GGLVQPGG | GTAALGCLVKDYFPEPVTVS | (SEQ | QLQLEHLLLD | PSSLSAS | VFIFPPS |
| | SLRLSCAA | WNSGALTSGVHTFPAVLQSS | ID NO: | LQMILNGINN | VGDRVTI | DEQLKSG |
| | SGFTFSDF | GLYSLSSVVTVPSSSLGTQT | 23) | YKNPKLTRML | TCRASQS | TASVVCL |
| | WMHWVRQA | YICNVNHKPSNTKVDKKVEP | | TFKFYMPKKA | VSRSLAW | LNNFYPR |
| | PGKGLEWI | KSCDKTHTCPPCPAPEAAGA | | TELKHLQCLE | YQQKPGK | EAKVQWK |
| | SYISGDSG | PSVFLFPPKPKDTLMISRTP | | EELKPLEEAL | APKLLIY | VDNALQS |
| | YTNYADSV | EVTCVVVDVSHEDPEVKFNW | | NLAPSKNFHL | AASSLQS | GNSQESV |
| | KGRFTISR | YVDGVEVHNAKTKPREEQYN | | RPRDLISDIN | GVPSRFS | TEQDSKD |
| | DNSKNTLY | STYRVVSVLTVLHQDWLNGK | | VIVLELKGSE | GSGSGTD | STYSLSS |
| | LQMNSLRA | EYKCKVSNKALPAPIEKTIS | | TTFMCEYADE | FTLTISS | TLTLSKA |
| | EDTAVYYC | KAKGQPREPQVYTLPPSREE | | TATIVEFINR | LQPEDFA | DYEKHKV |
| | ARDRPQYY | MTKNQVSLTCLVKGFYPSDI | | WITFSQSIIS | TYYCQQY | YACEVTH |
| | YMDVWGKG | AVEWESNGQPENNYKTTPPV | | TLT (SEQ | KSYPVTF | QGLSSPV |
| | TTVTVSS | LDSDGSFFLYSKLTVDKSRW | | ID NO: 41) | GQGTKVE | TKSFNRG |
| | (SEQ ID | QQGNVFSCSVMHEALHNHYT | | | IK (SEQ | EC (SEQ |
| | NO: | QKSLSLSPG (SEQ ID | | | ID NO: | ID NO: |
| | 1348) | NO: 44) | | | 592) | 45) |
| MIAB | EVQLLESG | ASTKGPSVFPLAPSSKSTSG | GGGGS | APTSSSTKKT | DIQMTQS | RTVAAPS |
| 129 | GGLVQPGG | GTAALGCLVKDYFPEPVTVS | (SEQ | QLQLEHLLLD | PSSLSAS | VFIFPPS |
| | SLRLSCAA | WNSGALTSGVHTFPAVLQSS | ID NO: | LQMILNGINN | VGDRVTI | DEQLKSG |
| | SGFTFSDF | GLYSLSSVVTVPSSSLGTQT | 23) | YKNPKLTRML | TCRASQS | TASVVCL |
| | WMHWVRQA | YICNVNHKPSNTKVDKKVEP | | TFKFYMPKKA | VSRSLAW | LNNFYPR |
| | PGKGLEWI | KSCDKTHTCPPCPAPEAAGA | | TELKHLQCLE | YQQKPGK | EAKVQWK |
| | SYISGDSG | PSVFLFPPKPKDTLMISRTP | | EELKPLEEAL | APKLLIY | VDNALQS |
| | YTNYADSV | EVTCVVVDVSHEDPEVKFNW | | NLAPSKNFHL | AASSLQS | GNSQESV |
| | KGRFTISR | YVDGVEVHNAKTKPREEQYN | | RPRDLISDIN | GVPSRFS | TEQDSKD |
| | DNSKNTLY | STYRVVSVLTVLHQDWLNGK | | VIVLELKGSE | GSGSGTD | STYSLSS |
| | LQMNSLRA | EYKCKVSNKALPAPIEKTIS | | TTFMCEYADE | FTLTISS | TLTLSKA |
| | EDTAVYYC | KAKGQPREPQVYTLPPSREE | | TATIVEFINR | LQPEDFA | DYEKHKV |
| | ARDRPGYY | MTKNQVSLTCLVKGFYPSDI | | WITFSQSIIS | TYYCQQY | YACEVTH |
| | YMDVWGKG | AVEWESNGQPENNYKTTPPV | | TLT (SEQ | KSYPVTF | QGLSSPV |
| | TTVTVSS | LDSDGSFFLYSKLTVDKSRW | | ID NO: 41) | GQGTKVE | TKSFNRG |
| | (SEQ ID | QQGNVFSCSVMHEALHNHYT | | | IK (SEQ | EC (SEQ |
| | NO: | QKSLSLSPG (SEQ ID | | | ID NO: | ID NO: |
| | 1349) | NO: 44) | | | 592) | 45) |
| MIAB | EVQLLESG | ASTKGPSVFPLAPSSKSTSG | GGGGS | APTSSSTKKT | DIQMTQS | RTVAAPS |
| 130 | GGLVQPGG | GTAALGCLVKDYFPEPVTVS | (SEQ | QLQLEHLLLD | PSSLSAS | VFIFPPS |
| | SLRLSCAA | WNSGALTSGVHTFPAVLQSS | ID NO: | LQMILNGINN | VGDRVTI | DEQLKSG |
| | SGFTFSDF | GLYSLSSVVTVPSSSLGTQT | 23) | YKNPKLTRML | TCRASQS | TASVVCL |
| | WMHWVRQA | YICNVNHKPSNTKVDKKVEP | | TFKFYMPKKA | VSRSLAW | LNNFYPR |
| | PGKGLEWI | KSCDKTHTCPPCPAPEAAGA | | TELKHLQCLE | YQQKPGK | EAKVQWK |
| | SYISGDSG | PSVFLFPPKPKDTLMISRTP | | EELKPLEEAL | APKLLIY | VDNALQS |
| | YTNYADSV | EVTCVVVDVSHEDPEVKFNW | | NLAPSKNFHL | AASSLQS | GNSQESV |
| | KGRFTISR | YVDGVEVHNAKTKPREEQYN | | RPRDLISDIN | GVPSRFS | TEQDSKD |
| | DNSKNTLY | STYRVVSVLTVLHQDWLNGK | | VIVLELKGSE | GSGSGTD | STYSLSS |
| | LQMNSLRA | EYKCKVSNKALPAPIEKTIS | | TTFMCEYADE | FTLTISS | TLTLSKA |
| | EDTAVYYC | KAKGQPREPQVYTLPPSREE | | TATIVEFINR | LQPEDFA | DYEKHKV |
| | ARDRPYYY | MTKNQVSLTCLVKGFYPSDI | | WITFSQSIIS | TYYCQQY | YACEVTH |
| | QMDVWGKG | AVEWESNGQPENNYKTTPPV | | TLT (SEQ | KSYPVTF | QGLSSPV |
| | TTVTVSS | LDSDGSFFLYSKLTVDKSRW | | ID NO: 41) | GQGTKVE | TKSFNRG |
| | (SEQ ID | QQGNVFSCSVMHEALHNHYT | | | IK (SEQ | EC (SEQ |
| | NO: | QKSLSLSPG (SEQ ID | | | ID NO: | ID NO: |
| | 1350) | NO: 44) | | | 592) | 45) |
| MIAB | EVQLLESG | ASTKGPSVFPLAPSSKSTSG | GGGGS | APTSSSTKKT | DIQMTQS | RTVAAPS |
| 131 | GGLVQPGG | GTAALGCLVKDYFPEPVTVS | (SEQ | QLQLEHLLLD | PSSLSAS | VFIFPPS |
| | SLRLSCAA | WNSGALTSGVHTFPAVLQSS | ID NO: | LQMILNGINN | VGDRVTI | DEQLKSG |
| | SGFTFSDF | GLYSLSSVVTVPSSSLGTQT | 23) | YKNPKLTRML | TCRASQS | TASVVCL |
| | WMHWVRQA | YICNVNHKPSNTKVDKKVEP | | TFKFYMPKKA | VSRSLAW | LNNFYPR |
| | PGKGLEWI | KSCDKTHTCPPCPAPEAAGA | | TELKHLQCLE | YQQKPGK | EAKVQWK |
| | SYISGDSG | PSVFLFPPKPKDTLMISRTP | | EELKPLEEAL | APKLLIY | VDNALQS |
| | YTNYADSV | EVTCVVVDVSHEDPEVKFNW | | NLAPSKNFHL | AASSLQS | GNSQESV |
| | KGRFTISR | YVDGVEVHNAKTKPREEQYN | | RPRDLISDIN | GVPSRFS | TEQDSKD |
| | DNSKNTLY | STYRVVSVLTVLHQDWLNGK | | VIVLELKGSE | GSGSGTD | STYSLSS |
| | LQMNSLRA | EYKCKVSNKALPAPIEKTIS | | TTFMCEYADE | FTLTISS | TLTLSKA |
| | EDTAVYYC | KAKGQPREPQVYTLPPSREE | | TATIVEFINR | LQPEDFA | DYEKHKV |
| | ARDRPYYY | MTKNQVSLTCLVKGFYPSDI | | WITFSQSIIS | TYYCQQY | YACEVTH |
| | GMDVWGKG | AVEWESNGQPENNYKTTPPV | | TLT (SEQ | KSYPVTF | QGLSSPV |
| | TTVTVSS | LDSDGSFFLYSKLTVDKSRW | | ID NO: 41) | GQGTKVE | TKSFNRG |
| | (SEQ ID | QQGNVFSCSVMHEALHNHYT | | | IK (SEQ | EC (SEQ |
| | NO: | QKSLSLSPG (SEQ ID | | | ID NO: | ID NO: |
| | 1351) | NO: 44) | | | 592) | 45) |
| MIAB | EVQLLESG | ASTKGPSVFPLAPSSKSTSG | GGGGS | APTSSSTKKT | DIQMTQS | RTVAAPS |
| 132 | GGLVQPGG | GTAALGCLVKDYFPEPVTVS | (SEQ | QLQLEHLLLD | PSSLSAS | VFIFPPS |
| | SLRLSCAA | WNSGALTSGVHTFPAVLQSS | ID NO: | LQMILNGINN | VGDRVTI | DEQLKSG |
| | SGFTFSNF | GLYSLSSVVTVPSSSLGTQT | 23) | YKNPKLTRML | TCRASQS | TASVVCL |
| | WMHWVRQA | YICNVNHKPSNTKVDKKVEP | | TFKFYMPKKA | VSRSLAW | LNNFYPR |
| | PGKGLEWI | KSCDKTHTCPPCPAPEAAGA | | TELKHLQCLE | YQQKPGK | EAKVQWK |
| | SYISGDSG | PSVFLFPPKPKDTLMISRTP | | EELKPLEEAL | APKLLIY | VDNALQS |
| | YTNYADSV | EVTCVVVDVSHEDPEVKFNW | | NLAPSKNFHL | AASSLQS | GNSQESV |
| | KGRFTISR | YVDGVEVHNAKTKPREEQYN | | RPRDLISDIN | GVPSRFS | TEQDSKD |
| | DNSKNTLY | STYRVVSVLTVLHQDWLNGK | | VIVLELKGSE | GSGSGTD | STYSLSS |
| | LQMNSLRA | EYKCKVSNKALPAPIEKTIS | | TTFMCEYADE | FTLTISS | TLTLSKA |
| | EDTAVYYC | KAKGQPREPQVYTLPPSREE | | TATIVEFINR | LQPEDFA | DYEKHKV |
| | ARDRPYYY | MTKNQVSLTCLVKGFYPSDI | | WITFSQSIIS | TYYCQQY | YACEVTH |
| | YMDVWGKG | AVEWESNGQPENNYKTTPPV | | TLT (SEQ | KSYPVTF | QGLSSPV |
| | TTVTVSS | LDSDGSFFLYSKLTVDKSRW | | ID NO: 41) | GQGTKVE | TKSFNRG |
| | (SEQ ID | QQGNVFSCSVMHEALHNHYT | | | IK (SEQ | EC (SEQ |
| | NO: | QKSLSLSPG (SEQ ID | | | ID NO: | ID NO: |
| | 1352) | NO: 44) | | | 592) | 45) |
| MIAB | EVQLLESG | ASTKGPSVFPLAPSSKSTSG | GGGGS | APTSSSTKKT | DIQMTQS | RTVAAPS |
| 133 | GGLVQPGG | GTAALGCLVKDYFPEPVTVS | (SEQ | QLQLEHLLLD | PSSLSAS | VFIFPPS |
| | SLRLSCAA | WNSGALTSGVHTFPAVLQSS | ID NO: | LQMILNGINN | VGDRVTI | DEQLKSG |
| | SGFTFSSF | GLYSLSSVVTVPSSSLGTQT | 23) | YKNPKLTRML | TCRASQS | TASVVCL |
| | WMHWVRQA | YICNVNHKPSNTKVDKKVEP | | TFKFYMPKKA | VSRSLAW | LNNFYPR |
| | PGKGLEWI | KSCDKTHTCPPCPAPEAAGA | | TELKHLQCLE | YQQKPGK | EAKVQWK |
| | SYISGDSG | PSVFLFPPKPKDTLMISRTP | | EELKPLEEAL | APKLLIY | VDNALQS |
| | YTNYADSV | EVTCVVVDVSHEDPEVKFNW | | NLAPSKNFHL | AASSLQS | GNSQESV |
| | KGRFTISR | YVDGVEVHNAKTKPREEQYN | | RPRDLISDIN | GVPSRFS | TEQDSKD |
| | DNSKNTLY | STYRVVSVLTVLHQDWLNGK | | VIVLELKGSE | GSGSGTD | STYSLSS |
| | LQMNSLRA | EYKCKVSNKALPAPIEKTIS | | TTFMCEYADE | FTLTISS | TLTLSKA |
| | EDTAVYYC | KAKGQPREPQVYTLPPSREE | | TATIVEFINR | LQPEDFA | DYEKHKV |
| | ARDRPYYY | MTKNQVSLTCLVKGFYPSDI | | WITFSQSIIS | TYYCQQY | YACEVTH |
| | YMDVWGKG | AVEWESNGQPENNYKTTPPV | | TLT (SEQ | KSYPVTF | QGLSSPV |
| | TTVTVSS | LDSDGSFFLYSKLTVDKSRW | | ID NO: 41) | GQGTKVE | TKSFNRG |
| | (SEQ ID | QQGNVFSCSVMHEALHNHYT | | | IK (SEQ | EC (SEQ |
| | NO: | QKSLSLSPG (SEQ ID | | | ID NO: | ID NO: |
| | 1353) | NO: 44) | | | 592) | 45) |
| MIAB | EVQLLESG | ASTKGPSVFPLAPSSKSTSG | GGGGS | APTSSSTKKT | DIQMTQS | RTVAAPS |
| 134 | GGLVQPGG | GTAALGCLVKDYFPEPVTVS | (SEQ | QLQLEHLLLD | PSSLSAS | VFIFPPS |
| | SLRLSCAA | WNSGALTSGVHTFPAVLQSS | ID NO: | LQMILNGINN | VGDRVTI | DEQLKSG |
| | SGFTFSAF | GLYSLSSVVTVPSSSLGTQT | 23) | YKNPKLTRML | TCRASQS | TASVVCL |
| | WMHWVRQA | YICNVNHKPSNTKVDKKVEP | | TFKFYMPKKA | VSRSLAW | LNNFYPR |
| | PGKGLEWI | KSCDKTHTCPPCPAPEAAGA | | TELKHLQCLE | YQQKPGK | EAKVQWK |
| | SYISGDSG | PSVFLFPPKPKDTLMISRTP | | EELKPLEEAL | APKLLIY | VDNALQS |
| | YTNYADSV | EVTCVVVDVSHEDPEVKFNW | | NLAPSKNFHL | AASSLQS | GNSQESV |
| | KGRFTISR | YVDGVEVHNAKTKPREEQYN | | RPRDLISDIN | GVPSRFS | TEQDSKD |
| | DNSKNTLY | STYRVVSVLTVLHQDWLNGK | | VIVLELKGSE | GSGSGTD | STYSLSS |
| | LQMNSLRA | EYKCKVSNKALPAPIEKTIS | | TTFMCEYADE | FTLTISS | TLTLSKA |
| | EDTAVYYC | KAKGQPREPQVYTLPPSREE | | TATIVEFINR | LQPEDFA | DYEKHKV |
| | ARDRPYYY | MTKNQVSLTCLVKGFYPSDI | | WITFSQSIIS | TYYCQQY | YACEVTH |
| | YMDVWGKG | AVEWESNGQPENNYKTTPPV | | TLT (SEQ | KSYPVTF | QGLSSPV |
| | TTVTVSS | LDSDGSFFLYSKLTVDKSRW | | ID NO: 41) | GQGTKVE | TKSFNRG |
| | (SEQ ID | QQGNVFSCSVMHEALHNHYT | | | IK (SEQ | EC (SEQ |
| | NO: | QKSLSLSPG (SEQ ID | | | ID NO: | ID NO: |
| | 1354) | NO: 44) | | | 592) | 45) |
| MIAB | EVQLLESG | ASTKGPSVFPLAPSSKSTSG | GGGGS | APTSSSTKKT | DIQMTQS | RTVAAPS |
| 135 | GGLVQPGG | GTAALGCLVKDYFPEPVTVS | (SEQ | QLQLEHLLLD | PSSLSAS | VFIFPPS |
| | SLRLSCAA | WNSGALTSGVHTFPAVLQSS | ID NO: | LQMILNGINN | VGDRVTI | DEQLKSG |
| | SGFTFSDF | GLYSLSSVVTVPSSSLGTQT | 23) | YKNPKLTRML | TCRASQS | TASVVCL |
| | WMHWVRQA | YICNVNHKPSNTKVDKKVEP | | TFKFYMPKKA | VSRSLAW | LNNFYPR |
| | PGKGLEWI | KSCDKTHTCPPCPAPEAAGA | | TELKHLQCLE | YQQKPGK | EAKVQWK |
| | SYISGDSG | PSVFLFPPKPKDTLMISRTP | | EELKPLEEAL | APKLLIY | VDNALQS |
| | YTNYADSV | EVTCVVVDVSHEDPEVKFNW | | NLAPSKNFHL | AASSLQS | GNSQESV |
| | KGRFTISR | YVDGVEVHNAKTKPREEQYN | | RPRDLISDIN | GVPSRFS | TEQDSKD |
| | DNSNNTLY | STYRVVSVLTVLHQDWLNGK | | VIVLELKGSE | GSGSGTD | STYSLSS |
| | LQMNSLRA | EYKCKVSNKALPAPIEKTIS | | TTFMCEYADE | FTLTISS | TLTLSKA |
| | EDTAVYYC | KAKGQPREPQVYTLPPSREE | | TATIVEFINR | LQPEDFA | DYEKHKV |
| | ARDRPYYY | MTKNQVSLTCLVKGFYPSDI | | WITFSQSIIS | TYYCQQY | YACEVTH |
| | YMDVWGKG | AVEWESNGQPENNYKTTPPV | | TLT (SEQ | KSYPVTF | QGLSSPV |
| | TTVTVSS | LDSDGSFFLYSKLTVDKSRW | | ID NO: 41) | GQGTKVE | TKSFNRG |
| | (SEQ ID | QQGNVFSCSVMHEALHNHYT | | | IK (SEQ | EC (SEQ |
| | NO: | QKSLSLSPG (SEQ ID | | | ID NO: | ID NO: |
| | 1355) | NO: 44) | | | 592) | 45) |
| MIAB | EVQLLESG | ASTKGPSVFPLAPSSKSTSG | GGGGS | APTSSSTKKT | DIQMTQS | RTVAAPS |
| 136 | GGLVQPGG | GTAALGCLVKDYFPEPVTVS | (SEQ | QLQLEHLLLD | PSSLSAS | VFIFPPS |
| | SLRLSCAA | WNSGALTSGVHTFPAVLQSS | ID NO: | LQMILNGINN | VGDRVTI | DEQLKSG |
| | SGFTFSSY | GLYSLSSVVTVPSSSLGTQT | 23) | YKNPKLTRML | TCRASQS | TASVVCL |
| | AMSWVRQA | YICNVNHKPSNTKVDKKVEP | | TFKFYMPKKA | VSRSLAW | LNNFYPR |
| | PGKGLEWI | KSCDKTHTCPPCPAPEAAGA | | TELKHLQCLE | YQQKPGK | EAKVQWK |
| | SYISGDSG | PSVFLFPPKPKDTLMISRTP | | EELKPLEEAL | APKLLIY | VDNALQS |
| | YTNYADSV | EVTCVVVDVSHEDPEVKFNW | | NLAPSKNFHL | AASSLQS | GNSQESV |
| | KGRFTISR | YVDGVEVHNAKTKPREEQYN | | RPRDLISDIN | GVPSRFS | TEQDSKD |
| | DNSKNTLY | STYRVVSVLTVLHQDWLNGK | | VIVLELKGSE | GSGSGTD | STYSLSS |
| | LQMNSLRA | EYKCKVSNKALPAPIEKTIS | | TTFMCEYADE | FTLTISS | TLTLSKA |
| | EDTAVYYC | KAKGQPREPQVYTLPPSREE | | TATIVEFINR | LQPEDFA | DYEKHKV |
| | ARDRPYYY | MTKNQVSLTCLVKGFYPSDI | | WITFSQSIIS | TYYCQQY | YACEVTH |
| | YMDVWGKG | AVEWESNGQPENNYKTTPPV | | TLT (SEQ | KSYPVTF | QGLSSPV |
| | TTVTVSS | LDSDGSFFLYSKLTVDKSRW | | ID NO: 41) | GQGTKVE | TKSFNRG |
| | (SEQ ID | QQGNVFSCSVMHEALHNHYT | | | IK (SEQ | EC (SEQ |
| | NO: | QKSLSLSPG (SEQ ID | | | ID NO: | ID NO: |
| | 1356) | NO: 44) | | | 592) | 45) |
| MIAB | EVQLLESG | ASTKGPSVFPLAPSSKSTSG | GGGGS | APTSSSTKKT | DIQMTQS | RTVAAPS |
| 137 | GGLVQPGG | GTAALGCLVKDYFPEPVTVS | (SEQ | QLQLEHLLLD | PSSLSAS | VFIFPPS |
| | SLRLSCAA | WNSGALTSGVHTFPAVLQSS | ID NO: | LQMILNGINN | VGDRVTI | DEQLKSG |
| | SGFTFSDF | GLYSLSSVVTVPSSSLGTQT | 23) | YKNPKLTRML | TCRASQS | TASVVCL |
| | WMHWVRQA | YICNVNHKPSNTKVDKKVEP | | TFKFYMPKKA | VSRSLAW | LNNFYPR |
| | PGKGLEWV | KSCDKTHTCPPCPAPEAAGA | | TELKHLQCLE | YQQKPGK | EAKVQWK |
| | SAISGSGG | PSVFLFPPKPKDTLMISRTP | | EELKPLEEAL | APKLLIY | VDNALQS |
| | STYYADSV | EVTCVVVDVSHEDPEVKFNW | | NLAPSKNFHL | AASSLQS | GNSQESV |
| | KGRFTISR | YVDGVEVHNAKTKPREEQYN | | RPRDLISDIN | GVPSRFS | TEQDSKD |
| | DNSKNTLY | STYRVVSVLTVLHQDWLNGK | | VIVLELKGSE | GSGSGTD | STYSLSS |
| | LQMNSLRA | EYKCKVSNKALPAPIEKTIS | | TTFMCEYADE | FTLTISS | TLTLSKA |
| | EDTAVYYC | KAKGQPREPQVYTLPPSREE | | TATIVEFINR | LQPEDFA | DYEKHKV |
| | ARDRPYYY | MTKNQVSLTCLVKGFYPSDI | | WITFSQSIIS | TYYCQQY | YACEVTH |
| | YMDVWGKG | AVEWESNGQPENNYKTTPPV | | TLT (SEQ | KSYPVTF | QGLSSPV |
| | TTVTVSS | LDSDGSFFLYSKLTVDKSRW | | ID NO: 41) | GQGTKVE | TKSFNRG |
| | (SEQ ID | QQGNVFSCSVMHEALHNHYT | | | IK (SEQ | EC (SEQ |
| | NO: | QKSLSLSPG (SEQ ID | | | ID NO: | ID NO: |
| | 1357) | NO: 44) | | | 592) | 45) |
| MIAB | EVQLLESG | ASTKGPSVFPLAPSSKSTSG | GGGGS | APTSSSTKKT | DIQMTQS | RTVAAPS |
| 138 | GGLVQPGG | GTAALGCLVKDYFPEPVTVS | (SEQ | QLQLEHLLLD | PSSLSAS | VFIFPPS |
| | SLRLSCAA | WNSGALTSGVHTFPAVLQSS | ID NO: | LQMILNGINN | VGDRVTI | DEQLKSG |
| | SGFTFSSY | GLYSLSSVVTVPSSSLGTQT | 23) | YKNPKLTRML | TCRASQS | TASVVCL |
| | AMSWVRQA | YICNVNHKPSNTKVDKKVEP | | TFKFYMPKKA | VSRSLAW | LNNFYPR |
| | PGKGLEWV | KSCDKTHTCPPCPAPEAAGA | | TELKHLQCLE | YQQKPGK | EAKVQWK |
| | SAISGSGG | PSVFLFPPKPKDTLMISRTP | | EELKPLEEAL | APKLLIY | VDNALQS |
| | STYYADSV | EVTCVVVDVSHEDPEVKFNW | | NLAPSKNFHL | AASSLQS | GNSQESV |
| | KGRFTISR | YVDGVEVHNAKTKPREEQYN | | RPRDLISDIN | GVPSRFS | TEQDSKD |
| | DNSKNTLY | STYRVVSVLTVLHQDWLNGK | | VIVLELKGSE | GSGSGTD | STYSLSS |
| | LQMNSLRA | EYKCKVSNKALPAPIEKTIS | | TTFMCEYADE | FTLTISS | TLTLSKA |
| | EDTAVYYC | KAKGQPREPQVYTLPPSREE | | TATIVEFINR | LQPEDFA | DYEKHKV |
| | ARDRPYYY | MTKNQVSLTCLVKGFYPSDI | | WITFSQSIIS | TYYCQQY | YACEVTH |
| | YMDVWGKG | AVEWESNGQPENNYKTTPPV | | TLT (SEQ | KSYPVTF | QGLSSPV |
| | TTVTVSS | LDSDGSFFLYSKLTVDKSRW | | ID NO: 41) | GQGTKVE | TKSFNRG |
| | (SEQ ID | QQGNVFSCSVMHEALHNHYT | | | IK (SEQ | EC (SEQ |
| | NO: | QKSLSLSPG (SEQ ID | | | ID NO: | ID NO: |
| | 1358) | NO: 44) | | | 592) | 45) |
| MIAB | EVQLLESG | ASTKGPSVFPLAPSSKSTSG | GGGGS | APTSSSTKKT | DIQMTQS | RTVAAPS |
| 139 | GGLVQPGG | GTAALGCLVKDYFPEPVTVS | (SEQ | QLQLEHLLLD | PSSLSAS | VFIFPPS |
| | SLRLSCAA | WNSGALTSGVHTFPAVLQSS | ID NO: | LQMILNGINN | VGDRVTI | DEQLKSG |
| | SGFTFSDF | GLYSLSSVVTVPSSSLGTQT | 23) | YKNPKLTRML | TCRASQS | TASVVCL |
| | WMHWVRQA | YICNVNHKPSNTKVDKKVEP | | TFKFYMPKKA | ISSYLNW | LNNFYPR |
| | PGKGLEWI | KSCDKTHTCPPCPAPEAAGA | | TELKHLQCLE | YQQKPGK | EAKVQWK |
| | SYISGDSG | PSVFLFPPKPKDTLMISRTP | | EELKPLEEAL | APKLLIY | VDNALQS |
| | YTNYADSV | EVTCVVVDVSHEDPEVKFNW | | NLAPSKNFHL | AASSLQS | GNSQESV |
| | KGRFTISR | YVDGVEVHNAKTKPREEQYN | | RPRDLISDIN | GVPSRFS | TEQDSKD |
| | DNSKNTLY | STYRVVSVLTVLHQDWLNGK | | VIVLELKGSE | GSGSGTD | STYSLSS |
| | LQMNSLRA | EYKCKVSNKALPAPIEKTIS | | TTFMCEYADE | FTLTISS | TLTLSKA |
| | EDTAVYYC | KAKGQPREPQVYTLPPSREE | | TATIVEFINR | LQPEDFA | DYEKHKV |
| | ARDRPYYY | MTKNQVSLTCLVKGFYPSDI | | WITFSQSIIS | TYYCQQS | YACEVTH |
| | YMDVWGKG | AVEWESNGQPENNYKTTPPV | | TLT (SEQ | YSTPRTF | QGLSSPV |
| | TTVTVSS | LDSDGSFFLYSKLTVDKSRW | | ID NO: 41) | GQGTKVE | TKSFNRG |
| | (SEQ ID | QQGNVFSCSVMHEALHNHYT | | | IK (SEQ | EC (SEQ |
| | NO: 591) | QKSLSLSPG (SEQ ID | | | ID NO: | ID NO: |
| | | NO: 44) | | | 1360) | 45) |
| MIAB | EVQLLESG | ASTKGPSVFPLAPSSKSTSG | GGGGS | APTSSSTKKT | DIQMTQS | RTVAAPS |
| 140 | GGLVQPGG | GTAALGCLVKDYFPEPVTVS | (SEQ | QLQLEHLLLD | PSSLSAS | VFIFPPS |
| | SLRLSCAA | WNSGALTSGVHTFPAVLQSS | ID NO: | LQMILNGINN | VGDRVTI | DEQLKSG |
| | SGFTFSSY | GLYSLSSVVTVPSSSLGTQT | 23) | YKNPKLTRML | TCRASQS | TASVVCL |
| | AMSWVRQA | YICNVNHKPSNTKVDKKVEP | | TFKFYMPKKA | ISSYLNW | LNNFYPR |
| | PGKGLEWV | KSCDKTHTCPPCPAPEAAGA | | TELKHLQCLE | YQQKPGK | EAKVQWK |
| | SAISGSGG | PSVFLFPPKPKDTLMISRTP | | EELKPLEEAL | APKLLIY | VDNALQS |
| | STYYADSV | EVTCVVVDVSHEDPEVKFNW | | NLAPSKNFHL | AASSLQS | GNSQESV |
| | KGRFTISR | YVDGVEVHNAKTKPREEQYN | | RPRDLISDIN | GVPSRFS | TEQDSKD |
| | DNSKNTLY | STYRVVSVLTVLHQDWLNGK | | VIVLELKGSE | GSGSGTD | STYSLSS |
| | LQMNSLRA | EYKCKVSNKALPAPIEKTIS | | TTFMCEYADE | FTLTISS | TLTLSKA |
| | EDTAVYYC | KAKGQPREPQVYTLPPSREE | | TATIVEFINR | LQPEDFA | DYEKHKV |
| | ARDRPYYY | MTKNQVSLTCLVKGFYPSDI | | WITFSQSIIS | TYYCQQS | YACEVTH |
| | YMDVWGKG | AVEWESNGQPENNYKTTPPV | | TLT (SEQ | YSTPRTF | QGLSSPV |
| | TTVTVSS | LDSDGSFFLYSKLTVDKSRW | | ID NO: 41) | GQGTKVE | TKSFNRG |
| | (SEQ ID | QQGNVFSCSVMHEALHNHYT | | | IK (SEQ | EC (SEQ |
| | NO: | QKSLSLSPG (SEQ ID | | | ID NO: | ID NO: |
| | 1358) | NO: 44) | | | 1360) | 45) |
| MIAB | EVQLLESG | ASTKGPSVFPLAPSSKSTSG | GGGGS | APTSSSTKKT | DIQMTQS | RTVAAPS |
| 141 | GGLVQPGG | GTAALGCLVKDYFPEPVTVS | (SEQ | QLQLEHLLLD | PSSLSAS | VFIFPPS |
| | SLRLSCAA | WNSGALTSGVHTFPAVLQSS | ID NO: | LQMILNGINN | VGDRVTI | DEQLKSG |
| | SGFTFSDF | GLYSLSSVVTVPSSSLGTQT | 23) | YKNPKLTRML | TCRASQS | TASVVCL |
| | WMHWVRQA | YICNVNHKPSNTKVDKKVEP | | TFKFYMPKKA | ISSYLNW | LNNFYPR |
| | PGKGLEWI | KSCDKTHTCPPCPAPEAAGA | | TELKHLQCLE | YQQKPGK | EAKVQWK |
| | SYISGDSG | PSVFLFPPKPKDTLMISRTP | | EELKPLEEAL | APKLLIY | VDNALQS |
| | YTNYADSV | EVTCVVVDVSHEDPEVKFNW | | NLAPSKNFHL | AASSLQS | GNSQESV |
| | KGRFTISR | YVDGVEVHNAKTKPREEQYN | | RPRDLISDIN | GVPSRFS | TEQDSKD |
| | DNSKNTLY | STYRVVSVLTVLHQDWLNGK | | VIVLELKGSE | GSGSGTD | STYSLSS |
| | LQMNSLRA | EYKCKVSNKALPAPIEKTIS | | TTFMCEYADE | FTLTISS | TLTLSKA |
| | EDTAVYYC | KAKGQPREPQVYTLPPSREE | | TATIVEFINR | LQPEDFA | DYEKHKV |
| | ARDRPYYY | MTKNQVSLTCLVKGFYPSDI | | WITFSQSIIS | TYYCQQY | YACEVTH |
| | YMDVWGKG | AVEWESNGQPENNYKTTPPV | | TLT (SEQ | KSYPVTF | QGLSSPV |
| | TTVTVSS | LDSDGSFFLYSKLTVDKSRW | | ID NO: 41) | GQGTKVE | TKSFNRG |
| | (SEQ ID | QQGNVFSCSVMHEALHNHYT | | | IK (SEQ | EC (SEQ |
| | NO: 591) | QKSLSLSPG (SEQ ID | | | ID NO: | ID NO: |
| | | NO: 44) | | | 1361) | 45) |
| MIAB | EVQLLESG | ASTKGPSVFPLAPSSKSTSG | GGGGS | APTSSSTKKT | DIQMTQS | RTVAAPS |
| 142 | GGLVQPGG | GTAALGCLVKDYFPEPVTVS | (SEQ | QLQLEHLLLD | PSSLSAS | VFIFPPS |
| | SLRLSCAA | WNSGALTSGVHTFPAVLQSS | ID NO: | LQMILNGINN | VGDRVTI | DEQLKSG |
| | SGFTFSDF | GLYSLSSVVTVPSSSLGTQT | 23) | YKNPKLTRML | TCRASQS | TASVVCL |
| | WMHWVRQA | YICNVNHKPSNTKVDKKVEP | | TFKFYMPKKA | VSRSLAW | LNNFYPR |
| | PGKGLEWI | KSCDKTHTCPPCPAPEAAGA | | TELKHLQCLE | YQQKPGK | EAKVQWK |
| | SYISGDSG | PSVFLFPPKPKDTLMISRTP | | EELKPLEEAL | APKLLIY | VDNALQS |
| | YTNYADSV | EVTCVVVDVSHEDPEVKFNW | | NLAPSKNFHL | AASSLQS | GNSQESV |
| | KGRFTISR | YVDGVEVHNAKTKPREEQYN | | RPRDLISDIN | GVPSRFS | TEQDSKD |
| | DNSKNTLY | STYRVVSVLTVLHQDWLNGK | | VIVLELKGSE | GSGSGTD | STYSLSS |
| | LQMNSLRA | EYKCKVSNKALPAPIEKTIS | | TTFMCEYADE | FTLTISS | TLTLSKA |
| | EDTAVYYC | KAKGQPREPQVYTLPPSREE | | TATIVEFINR | LQPEDFA | DYEKHKV |
| | ARDRPYYY | MTKNQVSLTCLVKGFYPSDI | | WITFSQSIIS | TYYCQQS | YACEVTH |
| | YMDVWGKG | AVEWESNGQPENNYKTTPPV | | TLT (SEQ | YSTPRTF | QGLSSPV |
| | TTVTVSS | LDSDGSFFLYSKLTVDKSRW | | ID NO: 41) | GQGTKVE | TKSFNRG |
| | (SEQ ID | QQGNVFSCSVMHEALHNHYT | | | IK (SEQ | EC (SEQ |
| | NO: 591) | QKSLSLSPG (SEQ ID | | | ID NO: | ID NO: |
| | | NO: 44) | | | 1362) | 45) |
| MIAB | EVQLLESG | ASTKGPSVFPLAPSSKSTSG | GGGGS | APTSSSTKKT | DIQMTQS | RTVAAPS |
| 143 | GGLVQPGG | GTAALGCLVKDYFPEPVTVS | (SEQ | QLQLEHLLLD | PSSLSAS | VFIFPPS |
| | SLRLSCAA | WNSGALTSGVHTFPAVLQSS | ID NO: | LQMILNGINN | VGDRVTI | DEQLKSG |
| | SGFTFSDF | GLYSLSSVVTVPSSSLGTQT | 23) | YKNPKLTRML | TCRASQS | TASVVCL |
| | WMHWVRQA | YICNVNHKPSNTKVDKKVEP | | TFKFYMPKKA | VSRSLAW | LNNFYPR |
| | PGKGLEWI | KSCDKTHTCPPCPAPEAAGA | | TELKHLQCLE | YQQKPGK | EAKVQWK |
| | SYISGDSG | PSVFLFPPKPKDTLMISRTP | | EELKPLEEAL | APKLLIY | VDNALQS |
| | YTNYADSV | EVTCVVVDVSHEDPEVKFNW | | NLAPSKNFHL | AASSLQS | GNSQESV |
| | KGRFTISR | YVDGVEVHNAKTKPREEQYN | | RPRDLISDIN | GVPSRFS | TEQDSKD |
| | DNSKNTLY | STYRVVSVLTVLHQDWLNGK | | VIVLELKGSE | GSGSGTD | STYSLSS |
| | LQMNSLRA | EYKCKVSNKALPAPIEKTIS | | TTFMCEYADE | FTLTISS | TLTLSKA |
| | EDTAVYYC | KAKGQPREPQVYTLPPSREE | | TATIVEFINR | LQPEDFA | DYEKHKV |
| | ARDRPYYY | MTKNQVSLTCLVKGFYPSDI | | WITFSQSIIS | TYYCQQY | YACEVTH |
| | YMDVWGKG | AVEWESNGQPENNYKTTPPV | | TLT (SEQ | KSYPVTF | QGLSSPV |
| | TTVTVSS | LDSDGSFFLYSKLTVDKSRW | | ID NO: 41) | GQGTKVE | TKSFNRG |
| | (SEQ ID | QQGNVFSCSVMHEALHNHYT | | | IK (SEQ | EC (SEQ |
| | NO: 591) | QKSLSLSPG (SEQ ID | | | ID NO: | ID NO: |
| | | NO: 44) | | | 592) | 45) |
| MIAB | EVQLLESG | ASTKGPSVFPLAPSSKSTSG | GGGGS | APTSSSTKKT | DIQMTQS | RTVAAPS |
| 144 | GGLVQPGG | GTAALGCLVKDYFPEPVTVS | (SEQ | QLQLEHLLLD | PSSLSAS | VFIFPPS |
| | SLRLSCAA | WNSGALTSGVHTFPAVLQSS | ID NO: | LQMILNGINN | VGDRVTI | DEQLKSG |
| | SGFTFSDF | GLYSLSSVVTVPSSSLGTQT | 23) | YKNPKLTRML | TCRASQS | TASVVCL |
| | WMHWVRQA | YICNVNHKPSNTKVDKKVEP | | TFKFYMPKKA | VSRSLAW | LNNFYPR |
| | PGKGLEWI | KSCDKTHTCPPCPAPEAAGA | | TELKHLQCLE | YQQKPGK | EAKVQWK |
| | SYISGDSG | PSVFLFPPKPKDTLMISRTP | | EELKPLEEAL | APKLLIY | VDNALQS |
| | YTNYADSV | EVTCVVVDVSHEDPEVKFNW | | NLAPSKNFHL | AASSLQS | GNSQESV |
| | KGRFTISR | YVDGVEVHNAKTKPREEQYN | | RPRDLISDIN | GVPSRFS | TEQDSKD |
| | DNSKNTLY | STYRVVSVLTVLHQDWLNGK | | VIVLELKGSE | GSGSGTD | STYSLSS |
| | LQMNSLRA | EYKCKVSNKALPAPIEKTIS | | TTFMCEYADE | FTLTISS | TLTLSKA |
| | EDTAVYYC | KAKGQPREPQVYTLPPSREE | | TATIVEFINR | LQPEDFA | DYEKHKV |
| | ARDRPYYY | MTKNQVSLTCLVKGFYPSDI | | WITFSQSIIS | TYYCQQY | YACEVTH |
| | YMDVWGKG | AVEWESNGQPENNYKTTPPV | | TLT (SEQ | KSYPVTF | QGLSSPV |
| | TTVTVSS | LDSDGSFFLYSKLTVDKSRW | | ID NO: 41) | GQGTKVE | TKSFNRG |
| | (SEQ ID | QQGNVFSCSVMHEALHNHYT | | | IK (SEQ | EC (SEQ |
| | NO: 591) | QKSLSLSPG (SEQ ID | | | ID NO: | ID NO: |
| | | NO: 44) | | | 592) | 45) |
| MIAB | EVQLLESG | ASTKGPSVFPLAPSSKSTSG | GGGGS | APTSSSTKKT | DIQMTQS | RTVAAPS |
| 145 | GGLVQPGG | GTAALGCLVKDYFPEPVTVS | (SEQ | QLQLEHLLLD | PSSLSAS | VFIFPPS |
| | SLRLSCAA | WNSGALTSGVHTFPAVLQSS | ID NO: | LQMILNGINN | VGDRVTI | DEQLKSG |
| | SGFTFSDF | GLYSLSSVVTVPSSSLGTQT | 23) | YKNPKLTRML | TCRASQS | TASVVCL |
| | WMHWVRQA | YICNVNHKPSNTKVDKKVEP | | TFKFYMPKKA | ISRSLAW | LNNFYPR |
| | PGKGLEWI | KSCDKTHTCPPCPAPEAAGA | | TELKHLQCLE | YQQKPGK | EAKVQWK |
| | SYISGDSG | PSVFLFPPKPKDTLMISRTP | | EELKPLEEAL | APKLLIY | VDNALQS |
| | YTNYADSV | EVTCVVVDVSHEDPEVKFNW | | NLAPSKNFHL | AASSLQS | GNSQESV |
| | KGRFTISR | YVDGVEVHNAKTKPREEQYN | | RPRDLISDIN | GVPSRFS | TEQDSKD |
| | DNSKNTLY | STYRVVSVLTVLHQDWLNGK | | VIVLELKGSE | GSGSGTD | STYSLSS |
| | LQMNSLRA | EYKCKVSNKALPAPIEKTIS | | TTFMCEYADE | FTLTISS | TLTLSKA |
| | EDTAVYYC | KAKGQPREPQVYTLPPSREE | | TATIVEFINR | LQPEDFA | DYEKHKV |
| | ARDRPYYY | MTKNQVSLTCLVKGFYPSDI | | WITFSQSIIS | TYYCQQY | YACEVTH |
| | YMDVWGKG | AVEWESNGQPENNYKTTPPV | | TLT (SEQ | KSYPVTF | QGLSSPV |
| | TTVTVSS | LDSDGSFFLYSKLTVDKSRW | | ID NO: 41) | GQGTKVE | TKSFNRG |
| | (SEQ ID | QQGNVFSCSVMHEALHNHYT | | | IK (SEQ | EC (SEQ |
| | NO: 591) | QKSLSLSPG (SEQ ID | | | ID NO: | ID NO: |
| | | NO: 44) | | | 1363) | 45) |
| MIAB | EVQLLESG | ASTKGPSVFPLAPSSKSTSG | GGGGS | APTSSSTKKT | DIQMTQS | RTVAAPS |
| 146 | GGLVQPGG | GTAALGCLVKDYFPEPVTVS | (SEQ | QLQLEHLLLD | PSSLSAS | VFIFPPS |
| | SLRLSCAA | WNSGALTSGVHTFPAVLQSS | ID NO: | LQMILNGINN | VGDRVTI | DEQLKSG |
| | SGFTFSDF | GLYSLSSVVTVPSSSLGTQT | 23) | YKNPKLTRML | TCRASQS | TASVVCL |
| | WMHWVRQA | YICNVNHKPSNTKVDKKVEP | | TFKFYMPKKA | VSSSLAW | LNNFYPR |
| | PGKGLEWI | KSCDKTHTCPPCPAPEAAGA | | TELKHLQCLE | YQQKPGK | EAKVQWK |
| | SYISGDSG | PSVFLFPPKPKDTLMISRTP | | EELKPLEEAL | APKLLIY | VDNALQS |
| | YTNYADSV | EVTCVVVDVSHEDPEVKFNW | | NLAPSKNFHL | AASSLQS | GNSQESV |
| | KGRFTISR | YVDGVEVHNAKTKPREEQYN | | RPRDLISDIN | GVPSRFS | TEQDSKD |
| | DNSKNTLY | STYRVVSVLTVLHQDWLNGK | | VIVLELKGSE | GSGSGTD | STYSLSS |
| | LQMNSLRA | EYKCKVSNKALPAPIEKTIS | | TTFMCEYADE | FTLTISS | TLTLSKA |
| | EDTAVYYC | KAKGQPREPQVYTLPPSREE | | TATIVEFINR | LQPEDFA | DYEKHKV |
| | ARDRPYYY | MTKNQVSLTCLVKGFYPSDI | | WITFSQSIIS | TYYCQQY | YACEVTH |
| | YMDVWGKG | AVEWESNGQPENNYKTTPPV | | TLT (SEQ | KSYPVTF | QGLSSPV |
| | TTVTVSS | LDSDGSFFLYSKLTVDKSRW | | ID NO: 41) | GQGTKVE | TKSFNRG |
| | (SEQ ID | QQGNVFSCSVMHEALHNHYT | | | IK (SEQ | EC (SEQ |
| | NO: 591) | 2KSLSLSPG (SEQ ID | | | ID NO: | ID NO: |
| | | NO: 44) | | | 1364) | 45) |
| MIAB | EVQLLESG | ASTKGPSVFPLAPSSKSTSG | GGGGS | APTSSSTKKT | DIQMTQS | RTVAAPS |
| 147 | GGLVQPGG | GTAALGCLVKDYFPEPVTVS | (SEQ | QLQLEHLLLD | PSSLSAS | VFIFPPS |
| | SLRLSCAA | WNSGALTSGVHTFPAVLQSS | ID NO: | LQMILNGINN | VGDRVTI | DEQLKSG |
| | SGFTFSDF | GLYSLSSVVTVPSSSLGTQT | 23) | YKNPKLTRML | TCRASQS | TASVVCL |
| | WMHWVRQA | YICNVNHKPSNTKVDKKVEP | | TFKFYMPKKA | VSRYLAW | LNNFYPR |
| | PGKGLEWI | KSCDKTHTCPPCPAPEAAGA | | TELKHLQCLE | YQQKPGK | EAKVQWK |
| | SYISGDSG | PSVFLFPPKPKDTLMISRTP | | EELKPLEEAL | APKLLIY | VDNALQS |
| | YTNYADSV | EVTCVVVDVSHEDPEVKFNW | | NLAPSKNFHL | AASSLQS | GNSQESV |
| | KGRFTISR | YVDGVEVHNAKTKPREEQYN | | RPRDLISDIN | GVPSRFS | TEQDSKD |
| | DNSKNTLY | STYRVVSVLTVLHQDWLNGK | | VIVLELKGSE | GSGSGTD | STYSLSS |
| | LQMNSLRA | EYKCKVSNKALPAPIEKTIS | | TTFMCEYADE | FTLTISS | TLTLSKA |
| | EDTAVYYC | KAKGQPREPQVYTLPPSREE | | TATIVEFINR | LQPEDFA | DYEKHKV |
| | ARDRPYYY | MTKNQVSLTCLVKGFYPSDI | | WITFSQSIIS | TYYCQQY | YACEVTH |
| | YMDVWGKG | AVEWESNGQPENNYKTTPPV | | TLT (SEQ | KSYPVTF | QGLSSPV |
| | TTVTVSS | LDSDGSFFLYSKLTVDKSRW | | ID NO: 41) | GQGTKVE | TKSFNRG |
| | (SEQ ID | QQGNVFSCSVMHEALHNHYT | | | IK (SEQ | EC (SEQ |
| | NO: 591) | QKSLSLSPG (SEQ ID | | | ID NO: | ID NO: |
| | | NO: 44) | | | 1365) | 45) |
| MIAB | EVQLLESG | ASTKGPSVFPLAPSSKSTSG | GGGGS | APTSSSTKKT | DIQMTQS | RTVAAPS |
| 148 | GGLVQPGG | GTAALGCLVKDYFPEPVTVS | (SEQ | QLQLEHLLLD | PSSLSAS | VFIFPPS |
| | SLRLSCAA | WNSGALTSGVHTFPAVLQSS | ID NO: | LQMILNGINN | VGDRVTI | DEQLKSG |
| | SGFTFSDF | GLYSLSSVVTVPSSSLGTQT | 23) | YKNPKLTRML | TCRASQS | TASVVCL |
| | WMHWVRQA | YICNVNHKPSNTKVDKKVEP | | TFKFYMPKKA | VSRSLNW | LNNFYPR |
| | PGKGLEWI | KSCDKTHTCPPCPAPEAAGA | | TELKHLQCLE | YQQKPGK | EAKVQWK |
| | SYISGDSG | PSVFLFPPKPKDTLMISRTP | | EELKPLEEAL | APKLLIY | VDNALQS |
| | YTNYADSV | EVTCVVVDVSHEDPEVKFNW | | NLAPSKNFHL | AASSLQS | GNSQESV |
| | KGRFTISR | YVDGVEVHNAKTKPREEQYN | | RPRDLISDIN | GVPSRFS | TEQDSKD |
| | DNSKNTLY | STYRVVSVLTVLHQDWLNGK | | VIVLELKGSE | GSGSGTD | STYSLSS |
| | LQMNSLRA | EYKCKVSNKALPAPIEKTIS | | TTFMCEYADE | FTLTISS | TLTLSKA |
| | EDTAVYYC | KAKGQPREPQVYTLPPSREE | | TATIVEFINR | LQPEDFA | DYEKHKV |
| | ARDRPYYY | MTKNQVSLTCLVKGFYPSDI | | WITFSQSIIS | TYYCQQY | YACEVTH |
| | YMDVWGKG | AVEWESNGQPENNYKTTPPV | | TLT (SEQ | KSYPVTF | QGLSSPV |
| | TTVTVSS | LDSDGSFFLYSKLTVDKSRW | | ID NO: 41) | GQGTKVE | TKSFNRG |
| | (SEQ ID | QQGNVFSCSVMHEALHNHYT | | | IK (SEQ | EC (SEQ |
| | NO: 591) | QKSLSLSPG (SEQ ID | | | ID NO: | ID NO: |
| | | NO: 44) | | | 1366) | 45) |
| MIAB | EVQLLESG | ASTKGPSVFPLAPSSKSTSG | GGGGS | APTSSSTKKT | DIQMTQS | RTVAAPS |
| 149 | GGLVQPGG | GTAALGCLVKDYFPEPVTVS | (SEQ | QLQLEHLLLD | PSSLSAS | VFIFPPS |
| | SLRLSCAA | WNSGALTSGVHTFPAVLQSS | ID NO: | LQMILNGINN | VGDRVTI | DEQLKSG |
| | SGFTFSDF | GLYSLSSVVTVPSSSLGTQT | 23) | YKNPKLTRML | TCRASQS | TASVVCL |
| | WMHWVRQA | YICNVNHKPSNTKVDKKVEP | | TFKFYMPKKA | ISSSLAW | LNNFYPR |
| | PGKGLEWI | KSCDKTHTCPPCPAPEAAGA | | TELKHLQCLE | YQQKPGK | EAKVQWK |
| | SYISGDSG | PSVFLFPPKPKDTLMISRTP | | EELKPLEEAL | APKLLIY | VDNALQS |
| | YTNYADSV | EVTCVVVDVSHEDPEVKFNW | | NLAPSKNFHL | AASSLQS | GNSQESV |
| | KGRFTISR | YVDGVEVHNAKTKPREEQYN | | RPRDLISDIN | GVPSRFS | TEQDSKD |
| | DNSKNTLY | STYRVVSVLTVLHQDWLNGK | | VIVLELKGSE | GSGSGTD | STYSLSS |
| | LQMNSLRA | EYKCKVSNKALPAPIEKTIS | | TTFMCEYADE | FTLTISS | TLTLSKA |
| | EDTAVYYC | KAKGQPREPQVYTLPPSREE | | TATIVEFINR | LQPEDFA | DYEKHKV |
| | ARDRPYYY | MTKNQVSLTCLVKGFYPSDI | | WITFSQSIIS | TYYCQQY | YACEVTH |
| | YMDVWGKG | AVEWESNGQPENNYKTTPPV | | TLT (SEQ | KSYPVTF | QGLSSPV |
| | TTVTVSS | LDSDGSFFLYSKLTVDKSRW | | ID NO: 41) | GQGTKVE | TKSFNRG |
| | (SEQ ID | QQGNVFSCSVMHEALHNHYT | | | IK (SEQ | EC (SEQ |
| | NO: 591) | QKSLSLSPG (SEQ ID | | | ID NO: | ID NO: |
| | | NO: 44) | | | 1367) | 45) |
| MIAB | EVQLLESG | ASTKGPSVFPLAPSSKSTSG | GGGGS | APTSSSTKKT | DIQMTQS | RTVAAPS |
| 150 | GGLVQPGG | GTAALGCLVKDYFPEPVTVS | (SEQ | QLQLEHLLLD | PSSLSAS | VFIFPPS |
| | SLRLSCAA | WNSGALTSGVHTFPAVLQSS | ID NO: | LQMILNGINN | VGDRVTI | DEQLKSG |
| | SGFTFSDF | GLYSLSSVVTVPSSSLGTQT | 23) | YKNPKLTRML | TCRASQS | TASVVCL |
| | WMHWVRQA | YICNVNHKPSNTKVDKKVEP | | TFKFYMPKKA | ISRYLAW | LNNFYPR |
| | PGKGLEWI | KSCDKTHTCPPCPAPEAAGA | | TELKHLQCLE | YQQKPGK | EAKVQWK |
| | SYISGDSG | PSVFLFPPKPKDTLMISRTP | | EELKPLEEAL | APKLLIY | VDNALQS |
| | YTNYADSV | EVTCVVVDVSHEDPEVKFNW | | NLAPSKNFHL | AASSLQS | GNSQESV |
| | KGRFTISR | YVDGVEVHNAKTKPREEQYN | | RPRDLISDIN | GVPSRFS | TEQDSKD |
| | DNSKNTLY | STYRVVSVLTVLHQDWLNGK | | VIVLELKGSE | GSGSGTD | STYSLSS |
| | LQMNSLRA | EYKCKVSNKALPAPIEKTIS | | TTFMCEYADE | FTLTISS | TLTLSKA |
| | EDTAVYYC | KAKGQPREPQVYTLPPSREE | | TATIVEFINR | LQPEDFA | DYEKHKV |
| | ARDRPYYY | MTKNQVSLTCLVKGFYPSDI | | WITFSQSIIS | TYYCQQY | YACEVTH |
| | YMDVWGKG | AVEWESNGQPENNYKTTPPV | | TLT (SEQ | KSYPVTF | QGLSSPV |
| | TTVTVSS | LDSDGSFFLYSKLTVDKSRW | | ID NO: 41) | GQGTKVE | TKSFNRG |
| | (SEQ ID | QQGNVFSCSVMHEALHNHYT | | | IK (SEQ | EC (SEQ |
| | NO: 591) | QKSLSLSPG (SEQ ID | | | ID NO: | ID NO: |
| | | NO: 44) | | | 1368) | 45) |
| MIAB | EVQLLESG | ASTKGPSVFPLAPSSKSTSG | GGGGS | APTSSSTKKT | DIQMTQS | RTVAAPS |
| 151 | GGLVQPGG | GTAALGCLVKDYFPEPVTVS | (SEQ | QLQLEHLLLD | PSSLSAS | VFIFPPS |
| | SLRLSCAA | WNSGALTSGVHTFPAVLQSS | ID NO: | LQMILNGINN | VGDRVTI | DEQLKSG |
| | SGFTFSDF | GLYSLSSVVTVPSSSLGTQT | 23) | YKNPKLTRML | TCRASQS | TASVVCL |
| | WMHWVRQA | YICNVNHKPSNTKVDKKVEP | | TFKFYMPKKA | ISRSLNW | LNNFYPR |
| | PGKGLEWI | KSCDKTHTCPPCPAPEAAGA | | TELKHLQCLE | YQQKPGK | EAKVQWK |
| | SYISGDSG | PSVFLFPPKPKDTLMISRTP | | EELKPLEEAL | APKLLIY | VDNALQS |
| | YTNYADSV | EVTCVVVDVSHEDPEVKFNW | | NLAPSKNFHL | AASSLQS | GNSQESV |
| | KGRFTISR | YVDGVEVHNAKTKPREEQYN | | RPRDLISDIN | GVPSRFS | TEQDSKD |
| | DNSKNTLY | STYRVVSVLTVLHQDWLNGK | | VIVLELKGSE | GSGSGTD | STYSLSS |
| | LQMNSLRA | EYKCKVSNKALPAPIEKTIS | | TTFMCEYADE | FTLTISS | TLTLSKA |
| | EDTAVYYC | KAKGQPREPQVYTLPPSREE | | TATIVEFINR | LQPEDFA | DYEKHKV |
| | ARDRPYYY | MTKNQVSLTCLVKGFYPSDI | | WITFSQSIIS | TYYCQQY | YACEVTH |
| | YMDVWGKG | AVEWESNGQPENNYKTTPPV | | TLT (SEQ | KSYPVTF | QGLSSPV |
| | TTVTVSS | LDSDGSFFLYSKLTVDKSRW | | ID NO: 41) | GQGTKVE | TKSFNRG |
| | (SEQ ID | QQGNVFSCSVMHEALHNHYT | | | IK (SEQ | EC (SEQ |
| | NO: 591) | QKSLSLSPG (SEQ ID | | | ID NO: | ID NO: |
| | | NO: 44) | | | 1369) | 45) |
| MIAB | EVQLLESG | ASTKGPSVFPLAPSSKSTSG | GGGGS | APTSSSTKKT | DIQMTQS | RTVAAPS |
| 152 | GGLVQPGG | GTAALGCLVKDYFPEPVTVS | (SEQ | QLQLEHLLLD | PSSLSAS | VFIFPPS |
| | SLRLSCAA | WNSGALTSGVHTFPAVLQSS | ID NO: | LQMILNGINN | VGDRVTI | DEQLKSG |
| | SGFTFSDF | GLYSLSSVVTVPSSSLGTQT | 23) | YKNPKLTRML | TCRASQS | TASVVCL |
| | WMHWVRQA | YICNVNHKPSNTKVDKKVEP | | TFKFYMPKKA | VSSYLAW | LNNFYPR |
| | PGKGLEWI | KSCDKTHTCPPCPAPEAAGA | | TELKHLQCLE | YQQKPGK | EAKVQWK |
| | SYISGDSG | PSVFLFPPKPKDTLMISRTP | | EELKPLEEAL | APKLLIY | VDNALQS |
| | YTNYADSV | EVTCVVVDVSHEDPEVKFNW | | NLAPSKNFHL | AASSLQS | GNSQESV |
| | KGRFTISR | YVDGVEVHNAKTKPREEQYN | | RPRDLISDIN | GVPSRFS | TEQDSKD |
| | DNSKNTLY | STYRVVSVLTVLHQDWLNGK | | VIVLELKGSE | GSGSGTD | STYSLSS |
| | LQMNSLRA | EYKCKVSNKALPAPIEKTIS | | TTFMCEYADE | FTLTISS | TLTLSKA |
| | EDTAVYYC | KAKGQPREPQVYTLPPSREE | | TATIVEFINR | LQPEDFA | DYEKHKV |
| | ARDRPYYY | MTKNQVSLTCLVKGFYPSDI | | WITFSQSIIS | TYYCQQY | YACEVTH |
| | YMDVWGKG | AVEWESNGQPENNYKTTPPV | | TLT (SEQ | KSYPVTF | QGLSSPV |
| | TTVTVSS | LDSDGSFFLYSKLTVDKSRW | | ID NO: 41) | GQGTKVE | TKSFNRG |
| | (SEQ ID | QQGNVFSCSVMHEALHNHYT | | | IK (SEQ | EC (SEQ |
| | NO: 591) | QKSLSLSPG (SEQ ID | | | ID NO: | ID NO: |
| | | NO: 44) | | | 1370) | 45) |
| MIAB | EVQLLESG | ASTKGPSVFPLAPSSKSTSG | GGGGS | APTSSSTKKT | DIQMTQS | RTVAAPS |
| 153 | GGLVQPGG | GTAALGCLVKDYFPEPVTVS | (SEQ | QLQLEHLLLD | PSSLSAS | VFIFPPS |
| | SLRLSCAA | WNSGALTSGVHTFPAVLQSS | ID NO: | LQMILNGINN | VGDRVTI | DEQLKSG |
| | SGFTFSDF | GLYSLSSVVTVPSSSLGTQT | 23) | YKNPKLTRML | TCRASQS | TASVVCL |
| | WMHWVRQA | YICNVNHKPSNTKVDKKVEP | | TFKFYMPKKA | VSSSLNW | LNNFYPR |
| | PGKGLEWI | KSCDKTHTCPPCPAPEAAGA | | TELKHLQCLE | YQQKPGK | EAKVQWK |
| | SYISGDSG | PSVFLFPPKPKDTLMISRTP | | EELKPLEEAL | APKLLIY | VDNALQS |
| | YTNYADSV | EVTCVVVDVSHEDPEVKFNW | | NLAPSKNFHL | AASSLQS | GNSQESV |
| | KGRFTISR | YVDGVEVHNAKTKPREEQYN | | RPRDLISDIN | GVPSRFS | TEQDSKD |
| | DNSKNTLY | STYRVVSVLTVLHQDWLNGK | | VIVLELKGSE | GSGSGTD | STYSLSS |
| | LQMNSLRA | EYKCKVSNKALPAPIEKTIS | | TTFMCEYADE | FTLTISS | TLTLSKA |
| | EDTAVYYC | KAKGQPREPQVYTLPPSREE | | TATIVEFINR | LQPEDFA | DYEKHKV |
| | ARDRPYYY | MTKNQVSLTCLVKGFYPSDI | | WITFSQSIIS | TYYCQQY | YACEVTH |
| | YMDVWGKG | AVEWESNGQPENNYKTTPPV | | TLT (SEQ | KSYPVTF | QGLSSPV |
| | TTVTVSS | LDSDGSFFLYSKLTVDKSRW | | ID NO: 41) | GQGTKVE | TKSFNRG |
| | (SEQ ID | QQGNVFSCSVMHEALHNHYT | | | IK (SEQ | EC (SEQ |
| | NO: 591) | QKSLSLSPG (SEQ ID | | | ID NO: | ID NO: |
| | | NO: 44) | | | 1371) | 45) |
| MIAB | EVQLLESG | ASTKGPSVFPLAPSSKSTSG | GGGGS | APTSSSTKKT | DIQMTQS | RTVAAPS |
| 154 | GGLVQPGG | GTAALGCLVKDYFPEPVTVS | (SEQ | QLQLEHLLLD | PSSLSAS | VFIFPPS |
| | SLRLSCAA | WNSGALTSGVHTFPAVLQSS | ID NO: | LQMILNGINN | VGDRVTI | DEQLKSG |
| | SGFTFSDF | GLYSLSSVVTVPSSSLGTQT | 23) | YKNPKLTRML | TCRASQS | TASVVCL |
| | WMHWVRQA | YICNVNHKPSNTKVDKKVEP | | TFKFYMPKKA | VSRYLNW | LNNFYPR |
| | PGKGLEWI | KSCDKTHTCPPCPAPEAAGA | | TELKHLQCLE | YQQKPGK | EAKVQWK |
| | SYISGDSG | PSVFLFPPKPKDTLMISRTP | | EELKPLEEAL | APKLLIY | VDNALQS |
| | YTNYADSV | EVTCVVVDVSHEDPEVKFNW | | NLAPSKNFHL | AASSLQS | GNSQESV |
| | KGRFTISR | YVDGVEVHNAKTKPREEQYN | | RPRDLISDIN | GVPSRFS | TEQDSKD |
| | DNSKNTLY | STYRVVSVLTVLHQDWLNGK | | VIVLELKGSE | GSGSGTD | STYSLSS |
| | LQMNSLRA | EYKCKVSNKALPAPIEKTIS | | TTFMCEYADE | FTLTISS | TLTLSKA |
| | EDTAVYYC | KAKGQPREPQVYTLPPSREE | | TATIVEFINR | LQPEDFA | DYEKHKV |
| | ARDRPYYY | MTKNQVSLTCLVKGFYPSDI | | WITFSQSIIS | TYYCQQY | YACEVTH |
| | YMDVWGKG | AVEWESNGQPENNYKTTPPV | | TLT (SEQ | KSYPVTF | QGLSSPV |
| | TTVTVSS | LDSDGSFFLYSKLTVDKSRW | | ID NO: 41) | GQGTKVE | TKSFNRG |
| | (SEQ ID | QQGNVFSCSVMHEALHNHYT | | | IK (SEQ | EC (SEQ |
| | NO: 591) | QKSLSLSPG (SEQ ID | | | ID NO: | ID NO: |
| | | NO: 44) | | | 1372) | 45) |
| MIAB | EVQLLESG | ASTKGPSVFPLAPSSKSTSG | GGGGS | APTSSSTKKT | DIQMTQS | RTVAAPS |
| 155 | GGLVQPGG | GTAALGCLVKDYFPEPVTVS | (SEQ | QLQLEHLLLD | PSSLSAS | VFIFPPS |
| | SLRLSCAA | WNSGALTSGVHTFPAVLQSS | ID NO: | LQMILNGINN | VGDRVTI | DEQLKSG |
| | SGFTFSDF | GLYSLSSVVTVPSSSLGTQT | 23) | YKNPKLTRML | TCRASQS | TASVVCL |
| | WMHWVRQA | YICNVNHKPSNTKVDKKVEP | | TFKFYMPKKA | ISSSLNW | LNNFYPR |
| | PGKGLEWI | KSCDKTHTCPPCPAPEAAGA | | TELKHLQCLE | YQQKPGK | EAKVQWK |
| | SYISGDSG | PSVFLFPPKPKDTLMISRTP | | EELKPLEEAL | APKLLIY | VDNALQS |
| | YTNYADSV | EVTCVVVDVSHEDPEVKFNW | | NLAPSKNFHL | AASSLQS | GNSQESV |
| | KGRFTISR | YVDGVEVHNAKTKPREEQYN | | RPRDLISDIN | GVPSRFS | TEQDSKD |
| | DNSKNTLY | STYRVVSVLTVLHQDWLNGK | | VIVLELKGSE | GSGSGTD | STYSLSS |
| | LQMNSLRA | EYKCKVSNKALPAPIEKTIS | | TTFMCEYADE | FTLTISS | TLTLSKA |
| | EDTAVYYC | KAKGQPREPQVYTLPPSREE | | TATIVEFINR | LQPEDFA | DYEKHKV |
| | ARDRPYYY | MTKNQVSLTCLVKGFYPSDI | | WITFSQSIIS | TYYCQQY | YACEVTH |
| | YMDVWGKG | AVEWESNGQPENNYKTTPPV | | TLT (SEQ | KSYPVTF | QGLSSPV |
| | TTVTVSS | LDSDGSFFLYSKLTVDKSRW | | ID NO: 41) | GQGTKVE | TKSFNRG |
| | (SEQ ID | QQGNVFSCSVMHEALHNHYT | | | IK (SEQ | EC (SEQ |
| | NO: 591) | QKSLSLSPG (SEQ ID | | | ID NO: | ID NO: |
| | | NO: 44) | | | 1373) | 45) |
| MIAB | EVQLLESG | ASTKGPSVFPLAPSSKSTSG | GGGGS | APTSSSTKKT | DIQMTQS | RTVAAPS |
| 156 | GGLVQPGG | GTAALGCLVKDYFPEPVTVS | (SEQ | QLQLEHLLLD | PSSLSAS | VFIFPPS |
| | SLRLSCAA | WNSGALTSGVHTFPAVLQSS | ID NO: | LQMILNGINN | VGDRVTI | DEQLKSG |
| | SGFTFSDE | GLYSLSSVVTVPSSSLGTQT | 23) | YKNPKLTRML | TCRASQS | TASVVCL |
| | WMHWVRQA | YICNVNHKPSNTKVDKKVEP | | TFKFYMPKKA | ISRYLNW | LNNFYPR |
| | PGKGLEWI | KSCDKTHTCPPCPAPEAAGA | | TELKHLQCLE | YQQKPGK | EAKVQWK |
| | SYISGDSG | PSVFLFPPKPKDTLMISRTP | | EELKPLEEAL | APKLLIY | VDNALQS |
| | YTNYADSV | EVTCVVVDVSHEDPEVKFNW | | NLAPSKNFHL | AASSLQS | GNSQESV |
| | KGRFTISR | YVDGVEVHNAKTKPREEQYN | | RPRDLISDIN | GVPSRFS | TEQDSKD |
| | DNSKNTLY | STYRVVSVLTVLHQDWLNGK | | VIVLELKGSE | GSGSGTD | STYSLSS |
| | LQMNSLRA | EYKCKVSNKALPAPIEKTIS | | TTFMCEYADE | FTLTISS | TLTLSKA |
| | EDTAVYYC | KAKGQPREPQVYTLPPSREE | | TATIVEFINR | LQPEDFA | DYEKHKV |
| | ARDRPYYY | MTKNQVSLTCLVKGFYPSDI | | WITFSQSIIS | TYYCQQY | YACEVTH |
| | YMDVWGKG | AVEWESNGQPENNYKTTPPV | | TLT (SEQ | KSYPVTF | QGLSSPV |
| | TTVTVSS | LDSDGSFFLYSKLTVDKSRW | | ID NO: 41) | GQGTKVE | TKSFNRG |
| | (SEQ ID | QQGNVFSCSVMHEALHNHYT | | | IK (SEQ | EC (SEQ |
| | NO: 591) | QKSLSLSPG (SEQ ID | | | ID NO: | ID NO: |
| | | NO: 44) | | | 1374) | 45) |
| MIAB | EVQLLESG | ASTKGPSVFPLAPSSKSTSG | GGGGS | APTSSSTKKT | DIQMTQS | RTVAAPS |
| 157 | GGLVQPGG | GTAALGCLVKDYFPEPVTVS | (SEQ | QLQLEHLLLD | PSSLSAS | VFIFPPS |
| | SLRLSCAA | WNSGALTSGVHTFPAVLQSS | ID NO: | LQMILNGINN | VGDRVTI | DEQLKSG |
| | SGFTFSDF | GLYSLSSVVTVPSSSLGTQT | 23) | YKNPKLTRML | TCRASQS | TASVVCL |
| | WMHWVRQA | YICNVNHKPSNTKVDKKVEP | | TFKFYMPKKA | ISSYLAW | LNNFYPR |
| | PGKGLEWI | KSCDKTHTCPPCPAPEAAGA | | TELKHLQCLE | YQQKPGK | EAKVQWK |
| | SYISGDSG | PSVFLFPPKPKDTLMISRTP | | EELKPLEEAL | APKLLIY | VDNALQS |
| | YTNYADSV | EVTCVVVDVSHEDPEVKFNW | | NLAPSKNFHL | AASSLQS | GNSQESV |
| | KGRFTISR | YVDGVEVHNAKTKPREEQYN | | RPRDLISDIN | GVPSRFS | TEQDSKD |
| | DNSKNTLY | STYRVVSVLTVLHQDWLNGK | | VIVLELKGSE | GSGSGTD | STYSLSS |
| | LQMNSLRA | EYKCKVSNKALPAPIEKTIS | | TTFMCEYADE | FTLTISS | TLTLSKA |
| | EDTAVYYC | KAKGQPREPQVYTLPPSREE | | TATIVEFINR | LQPEDFA | DYEKHKV |
| | ARDRPYYY | MTKNQVSLTCLVKGFYPSDI | | WITFSQSIIS | TYYCQQY | YACEVTH |
| | YMDVWGKG | AVEWESNGQPENNYKTTPPV | | TLT (SEQ | KSYPVTF | QGLSSPV |
| | TTVTVSS | LDSDGSFFLYSKLTVDKSRW | | ID NO: 41) | GQGTKVE | TKSFNRG |
| | (SEQ ID | QQGNVFSCSVMHEALHNHYT | | | IK (SEQ | EC (SEQ |
| | NO: 591) | QKSLSLSPG (SEQ ID | | | ID NO: | ID NO: |
| | | NO: 44) | | | 1375) | 45) |
| MIAB | EVQLLESG | ASTKGPSVFPLAPSSKSTSG | GGGGS | APTSSSTKKT | DIQMTQS | RTVAAPS |
| 158 | GGLVQPGG | GTAALGCLVKDYFPEPVTVS | (SEQ | QLQLEHLLLD | PSSLSAS | VFIFPPS |
| | SLRLSCAA | WNSGALTSGVHTFPAVLQSS | ID NO: | LQMILNGINN | VGDRVTI | DEQLKSG |
| | SGFTFSDF | GLYSLSSVVTVPSSSLGTQT | 23) | YKNPKLTRML | TCRASQS | TASVVCL |
| | WMHWVRQA | YICNVNHKPSNTKVDKKVEP | | TFKFYMPKKA | VSSYLNW | LNNFYPR |
| | PGKGLEWI | KSCDKTHTCPPCPAPEAAGA | | TELKHLQCLE | YQQKPGK | EAKVQWK |
| | SYISGDSG | PSVFLFPPKPKDTLMISRTP | | EELKPLEEAL | APKLLIY | VDNALQS |
| | YTNYADSV | EVTCVVVDVSHEDPEVKFNW | | NLAPSKNFHL | AASSLQS | GNSQESV |
| | KGRFTISR | YVDGVEVHNAKTKPREEQYN | | RPRDLISDIN | GVPSRFS | TEQDSKD |
| | DNSKNTLY | STYRVVSVLTVLHQDWLNGK | | VIVLELKGSE | GSGSGTD | STYSLSS |
| | LQMNSLRA | EYKCKVSNKALPAPIEKTIS | | TTFMCEYADE | FTLTISS | TLTLSKA |
| | EDTAVYYC | KAKGQPREPQVYTLPPSREE | | TATIVEFINR | LQPEDFA | DYEKHKV |
| | ARDRPYYY | MTKNQVSLTCLVKGFYPSDI | | WITFSQSIIS | TYYCQQY | YACEVTH |
| | YMDVWGKG | AVEWESNGQPENNYKTTPPV | | TLT (SEQ | KSYPVTF | QGLSSPV |
| | TTVTVSS | LDSDGSFFLYSKLTVDKSRW | | ID NO: 41) | GQGTKVE | TKSFNRG |
| | (SEQ ID | QQGNVFSCSVMHEALHNHYT | | | IK (SEQ | EC (SEQ |
| | NO: 591) | QKSLSLSPG (SEQ ID | | | ID NO: | ID NO: |
| | | NO: 44) | | | 1376) | 45) |
| MIAB | EVQLLESG | ASTKGPSVFPLAPSSKSTSG | GGGGS | APTSSSTKKT | DIQMTQS | RTVAAPS |
| 159 | GGLVQPGG | GTAALGCLVKDYFPEPVTVS | (SEQ | QLQLEHLLLD | PSSLSAS | VFIFPPS |
| | SLRLSCAA | WNSGALTSGVHTFPAVLQSS | ID NO: | LQMILNGINN | VGDRVTI | DEQLKSG |
| | SGFTFSDF | GLYSLSSVVTVPSSSLGTQT | 23) | YKNPKLTRML | TCRASQS | TASVVCL |
| | WMHWVRQA | YICNVNHKPSNTKVDKKVEP | | TFKFYMPKKA | VSRSLAW | LNNFYPR |
| | PGKGLEWI | KSCDKTHTCPPCPAPEAAGA | | TELKHLQCLE | YQQKPGK | EAKVQWK |
| | SYISGESG | PSVFLFPPKPKDTLMISRTP | | EELKPLEEAL | APKLLIY | VDNALQS |
| | YTNYADSV | EVTCVVVDVSHEDPEVKFNW | | NLAPSKNFHL | AASSLQS | GNSQESV |
| | KGRFTISR | YVDGVEVHNAKTKPREEQYN | | RPRDLISDIN | GVPSRFS | TEQDSKD |
| | DNSKNTLY | STYRVVSVLTVLHQDWLNGK | | VIVLELKGSE | GSGSGTD | STYSLSS |
| | LQMNSLRA | EYKCKVSNKALPAPIEKTIS | | TTFMCEYADE | FTLTISS | TLTLSKA |
| | EDTAVYYC | KAKGQPREPQVYTLPPSREE | | TATIVEFINR | LQPEDFA | DYEKHKV |
| | ARDRPYYY | MTKNQVSLTCLVKGFYPSDI | | WITFSQSIIS | TYYCQQY | YACEVTH |
| | YMDVWGKG | AVEWESNGQPENNYKTTPPV | | TLT (SEQ | KSYPVTF | QGLSSPV |
| | TTVTVSS | LDSDGSFFLYSKLTVDKSRW | | ID NO: 41) | GQGTKVE | TKSFNRG |
| | (SEQ ID | QQGNVFSCSVMHEALHNHYT | | | IK (SEQ | EC (SEQ |
| | NO: | QKSLSLSPG (SEQ ID | | | ID NO: | ID NO: |
| | 1377) | NO: 44) | | | 592) | 45) |
| MIAB | EVQLLESG | ASTKGPSVFPLAPSSKSTSG | GGGGS | APTSSSTKKT | DIQMTQS | RTVAAPS |
| 160 | GGLVQPGG | GTAALGCLVKDYFPEPVTVS | (SEQ | QLQLEHLLLD | PSSLSAS | VFIFPPS |
| | SLRLSCAA | WNSGALTSGVHTFPAVLQSS | ID NO: | LQMILNGINN | VGDRVTI | DEQLKSG |
| | SGFTFSDF | GLYSLSSVVTVPSSSLGTQT | 23) | YKNPKLTRML | TCRASQS | TASVVCL |
| | WMHWVRQA | YICNVNHKPSNTKVDKKVEP | | TFKFYMPKKA | VSRSLAW | LNNFYPR |
| | PGKGLEWI | KSCDKTHTCPPCPAPEAAGA | | TELKHLQCLE | YQQKPGK | EAKVQWK |
| | SYISGDSG | PSVFLFPPKPKDTLMISRTP | | EELKPLEEAL | APKLLIY | VDNALQS |
| | YTQYADSV | EVTCVVVDVSHEDPEVKFNW | | NLAPSKNFHL | AASSLQS | GNSQESV |
| | KGRFTISR | YVDGVEVHNAKTKPREEQYN | | RPRDLISDIN | GVPSRFS | TEQDSKD |
| | DNSKNTLY | STYRVVSVLTVLHQDWLNGK | | VIVLELKGSE | GSGSGTD | STYSLSS |
| | LQMNSLRA | EYKCKVSNKALPAPIEKTIS | | TTFMCEYADE | FTLTISS | TLTLSKA |
| | EDTAVYYC | KAKGQPREPQVYTLPPSREE | | TATIVEFINR | LQPEDFA | DYEKHKV |
| | ARDRPYYY | MTKNQVSLTCLVKGFYPSDI | | WITFSQSIIS | TYYCQQY | YACEVTH |
| | YMDVWGKG | AVEWESNGQPENNYKTTPPV | | TLT (SEQ | KSYPVTF | QGLSSPV |
| | TTVTVSS | LDSDGSFFLYSKLTVDKSRW | | ID NO: 41) | GQGTKVE | TKSFNRG |
| | (SEQ ID | QQGNVFSCSVMHEALHNHYT | | | IK (SEQ | EC (SEQ |
| | NO: | QKSLSLSPG (SEQ ID | | | ID NO: | ID NO: |
| | 1378) | NO: 44) | | | 592) | 45) |
| MIAB | EVQLLESG | ASTKGPSVFPLAPSSKSTSG | GGGGS | APTSSSTKKT | DIQMTQS | RTVAAPS |
| 161 | GGLVQPGG | GTAALGCLVKDYFPEPVTVS | (SEQ | QLQLEHLLLD | PSSLSAS | VFIFPPS |
| | SLRLSCAA | WNSGALTSGVHTFPAVLQSS | ID NO: | LQMILNGINN | VGDRVTI | DEQLKSG |
| | SGFTFSDF | GLYSLSSVVTVPSSSLGTQT | 23) | YKNPKLTRML | TCRASQS | TASVVCL |
| | WMHWVRQA | YICNVNHKPSNTKVDKKVEP | | TFKFYMPKKA | VSRSLAW | LNNFYPR |
| | PGKGLEWI | KSCDKTHTCPPCPAPEAAGA | | TELKHLQCLE | YQQKPGK | EAKVQWK |
| | SYISGDSG | PSVFLFPPKPKDTLMISRTP | | EELKPLEEAL | APKLLIY | VDNALQS |
| | YTNYADSV | EVTCVVVDVSHEDPEVKFNW | | NLAPSKNFHL | AASSLQS | GNSQESV |
| | KGRFTISR | YVDGVEVHNAKTKPREEQYN | | RPRDLISDIN | GVPSRFS | TEQDSKD |
| | DQSKNTLY | STYRVVSVLTVLHQDWLNGK | | VIVLELKGSE | GSGSGTD | STYSLSS |
| | LQMNSLRA | EYKCKVSNKALPAPIEKTIS | | TTFMCEYADE | FTLTISS | TLTLSKA |
| | EDTAVYYC | KAKGQPREPQVYTLPPSREE | | TATIVEFINR | LQPEDFA | DYEKHKV |
| | ARDRPYYY | MTKNQVSLTCLVKGFYPSDI | | WITFSQSIIS | TYYCQQY | YACEVTH |
| | YMDVWGKG | AVEWESNGQPENNYKTTPPV | | TLT (SEQ | KSYPVTF | QGLSSPV |
| | TTVTVSS | LDSDGSFFLYSKLTVDKSRW | | ID NO: 41) | GQGTKVE | TKSFNRG |
| | (SEQ ID | QQGNVFSCSVMHEALHNHYT | | | IK (SEQ | EC (SEQ |
| | NO: | QKSLSLSPG (SEQ ID | | | ID NO: | ID NO: |
| | 1379) | NO: 44) | | | 592) | 45) |
| MIAB | EVQLLESG | ASTKGPSVFPLAPSSKSTSG | GGGGS | APTSSSTKKT | DIQMTQS | RTVAAPS |
| 162 | GGLVQPGG | GTAALGCLVKDYFPEPVTVS | (SEQ | QLQLEHLLLD | PSSLSAS | VFIFPPS |
| | SLRLSCAA | WNSGALTSGVHTFPAVLQSS | ID NO: | LQMILNGINN | VGDRVTI | DEQLKSG |
| | SGFTFSDF | GLYSLSSVVTVPSSSLGTQT | 23) | YKNPKLTRML | TCRASQS | TASVVCL |
| | WMHWVRQA | YICNVNHKPSNTKVDKKVEP | | TFKFYMPKKA | VSRSLGW | LNNFYPR |
| | PGKGLEWI | KSCDKTHTCPPCPAPEAAGA | | TELKHLQCLE | YQQKPGK | EAKVQWK |
| | SYISGDSG | PSVFLFPPKPKDTLMISRTP | | EELKPLEEAL | APKLLIY | VDNALQS |
| | YTNYADSV | EVTCVVVDVSHEDPEVKFNW | | NLAPSKNFHL | AASSLQS | GNSQESV |
| | KGRFTISR | YVDGVEVHNAKTKPREEQYN | | RPRDLISDIN | GVPSRFS | TEQDSKD |
| | DNSKNTLY | STYRVVSVLTVLHQDWLNGK | | VIVLELKGSE | GSGSGTD | STYSLSS |
| | LQMNSLRA | EYKCKVSNKALPAPIEKTIS | | TTFMCEYADE | FTLTISS | TLTLSKA |
| | EDTAVYYC | KAKGQPREPQVYTLPPSREE | | TATIVEFINR | LQPEDFA | DYEKHKV |
| | ARDRPYYY | MTKNQVSLTCLVKGFYPSDI | | WITFSQSIIS | TYYCQQY | YACEVTH |
| | YMDVWGKG | AVEWESNGQPENNYKTTPPV | | TLT (SEQ | KSYPVTF | QGLSSPV |
| | TTVTVSS | LDSDGSFFLYSKLTVDKSRW | | ID NO: 41) | GQGTKVE | TKSFNRG |
| | (SEQ ID | QQGNVFSCSVMHEALHNHYT | | | IK (SEQ | EC (SEQ |
| | NO: 591) | QKSLSLSPG (SEQ ID | | | ID NO: | ID NO: |
| | | NO: 44) | | | 1380) | 45) |
| MIAB | EVQLLESG | ASTKGPSVFPLAPSSKSTSG | GGGGS | APTSSSTKKT | DIQMTQS | RTVAAPS |
| 163 | GGLVQPGG | GTAALGCLVKDYFPEPVTVS | (SEQ | QLQLEHLLLD | PSSLSAS | VFIFPPS |
| | SLRLSCAA | WNSGALTSGVHTFPAVLQSS | ID NO: | LQMILNGINN | VGDRVTI | DEQLKSG |
| | SGFTFSDF | GLYSLSSVVTVPSSSLGTQT | 23) | YKNPKLTRML | TCRASQS | TASVVCL |
| | WMHWVRQA | YICNVNHKPSNTKVDKKVEP | | TFKFYMPKKA | VSRSLDW | LNNFYPR |
| | PGKGLEWI | KSCDKTHTCPPCPAPEAAGA | | TELKHLQCLE | YQQKPGK | EAKVQWK |
| | SYISGDSG | PSVFLFPPKPKDTLMISRTP | | EELKPLEEAL | APKLLIY | VDNALQS |
| | YTNYADSV | EVTCVVVDVSHEDPEVKFNW | | NLAPSKNFHL | AASSLQS | GNSQESV |
| | KGRFTISR | YVDGVEVHNAKTKPREEQYN | | RPRDLISDIN | GVPSRFS | TEQDSKD |
| | DNSKNTLY | STYRVVSVLTVLHQDWLNGK | | VIVLELKGSE | GSGSGTD | STYSLSS |
| | LQMNSLRA | EYKCKVSNKALPAPIEKTIS | | TTFMCEYADE | FTLTISS | TLTLSKA |
| | EDTAVYYC | KAKGQPREPQVYTLPPSREE | | TATIVEFINR | LQPEDFA | DYEKHKV |
| | ARDRPYYY | MTKNQVSLTCLVKGFYPSDI | | WITFSQSIIS | TYYCQQY | YACEVTH |
| | YMDVWGKG | AVEWESNGQPENNYKTTPPV | | TLT (SEQ | KSYPVTF | QGLSSPV |
| | TTVTVSS | LDSDGSFFLYSKLTVDKSRW | | ID NO: 41) | GQGTKVE | TKSFNRG |
| | (SEQ ID | QQGNVFSCSVMHEALHNHYT | | | IK (SEQ | EC (SEQ |
| | NO: 591) | QKSLSLSPG (SEQ ID | | | ID NO: | ID NO: |
| | | NO: 44) | | | 1381) | 45) |
| MIAB | EVQLLESG | ASTKGPSVFPLAPSSKSTSG | GGGGS | APTSSSTKKT | DIQMTQS | RTVAAPS |
| 164 | GGLVQPGG | GTAALGCLVKDYFPEPVTVS | (SEQ | QLQLEHLLLD | PSSLSAS | VFIFPPS |
| | SLRLSCAA | WNSGALTSGVHTFPAVLQSS | ID NO: | LQMILNGINN | VGDRVTI | DEQLKSG |
| | SGFTFSDF | GLYSLSSVVTVPSSSLGTQT | 23) | YKNPKLTRML | TCRASQS | TASVVCL |
| | WMHWVRQA | YICNVNHKPSNTKVDKKVEP | | TFKFYMPKKA | VSRSLTW | LNNFYPR |
| | PGKGLEWI | KSCDKTHTCPPCPAPEAAGA | | TELKHLQCLE | YQQKPGK | EAKVQWK |
| | SYISGDSG | PSVFLFPPKPKDTLMISRTP | | EELKPLEEAL | APKLLIY | VDNALQS |
| | YTNYADSV | EVTCVVVDVSHEDPEVKFNW | | NLAPSKNFHL | AASSLQS | GNSQESV |
| | KGRFTISR | YVDGVEVHNAKTKPREEQYN | | RPRDLISDIN | GVPSRFS | TEQDSKD |
| | DNSKNTLY | STYRVVSVLTVLHQDWLNGK | | VIVLELKGSE | GSGSGTD | STYSLSS |
| | LQMNSLRA | EYKCKVSNKALPAPIEKTIS | | TTFMCEYADE | FTLTISS | TLTLSKA |
| | EDTAVYYC | KAKGQPREPQVYTLPPSREE | | TATIVEFINR | LQPEDFA | DYEKHKV |
| | ARDRPYYY | MTKNQVSLTCLVKGFYPSDI | | WITFSQSIIS | TYYCQQY | YACEVTH |
| | YMDVWGKG | AVEWESNGQPENNYKTTPPV | | TLT (SEQ | KSYPVTF | QGLSSPV |
| | TTVTVSS | LDSDGSFFLYSKLTVDKSRW | | ID NO: 41) | GQGTKVE | TKSFNRG |
| | (SEQ ID | QQGNVFSCSVMHEALHNHYT | | | IK (SEQ | EC (SEQ |
| | NO: 591) | QKSLSLSPG (SEQ ID | | | ID NO: | ID NO: |
| | | NO: 44) | | | 1382) | 45) |
| MIAB | EVQLLESG | ASTKGPSVFPLAPSSKSTSG | GGGGS | APTSSSTKKT | DIQMTQS | RTVAAPS |
| 165 | GGLVQPGG | GTAALGCLVKDYFPEPVTVS | (SEQ | QLQLEHLLLD | PSSLSAS | VFIFPPS |
| | SLRLSCAA | WNSGALTSGVHTFPAVLQSS | ID NO: | LQMILNGINN | VGDRVTI | DEQLKSG |
| | SGFTFSDF | GLYSLSSVVTVPSSSLGTQT | 23) | YKNPKLTRML | TCRASQS | TASVVCL |
| | WMHWVRQA | YICNVNHKPSNTKVDKKVEP | | TFKFYMPKKA | VSRSLSW | LNNFYPR |
| | PGKGLEWI | KSCDKTHTCPPCPAPEAAGA | | TELKHLQCLE | YQQKPGK | EAKVQWK |
| | SYISGDSG | PSVFLFPPKPKDTLMISRTP | | EELKPLEEAL | APKLLIY | VDNALQS |
| | YTNYADSV | EVTCVVVDVSHEDPEVKFNW | | NLAPSKNFHL | AASSLQS | GNSQESV |
| | KGRFTISR | YVDGVEVHNAKTKPREEQYN | | RPRDLISDIN | GVPSRFS | TEQDSKD |
| | DNSKNTLY | STYRVVSVLTVLHQDWLNGK | | VIVLELKGSE | GSGSGTD | STYSLSS |
| | LQMNSLRA | EYKCKVSNKALPAPIEKTIS | | TTFMCEYADE | FTLTISS | TLTLSKA |
| | EDTAVYYC | KAKGQPREPQVYTLPPSREE | | TATIVEFINR | LQPEDFA | DYEKHKV |
| | ARDRPYYY | MTKNQVSLTCLVKGFYPSDI | | WITFSQSIIS | TYYCQQY | YACEVTH |
| | YMDVWGKG | AVEWESNGQPENNYKTTPPV | | TLT (SEQ | KSYPVTF | QGLSSPV |
| | TTVTVSS | LDSDGSFFLYSKLTVDKSRW | | ID NO: 41) | GQGTKVE | TKSFNRG |
| | (SEQ ID | QQGNVFSCSVMHEALHNHYT | | | IK (SEQ | EC (SEQ |
| | NO: 591) | QKSLSLSPG (SEQ ID | | | ID NO: | ID NO: |
| | | NO: 44) | | | 1383) | 45) |
| MIAB | EVQLLESG | ASTKGPSVFPLAPSSKSTSG | GGGGS | APTSSSTKKT | DIQMTQS | RTVAAPS |
| 166 | GGLVQPGG | GTAALGCLVKDYFPEPVTVS | (SEQ | QLQLEHLLLD | PSSLSAS | VFIFPPS |
| | SLRLSCAA | WNSGALTSGVHTFPAVLQSS | ID NO: | LQMILNGINN | VGDRVTI | DEQLKSG |
| | SGFTFSDF | GLYSLSSVVTVPSSSLGTQT | 23) | YKNPKLTRML | TCRASQS | TASVVCL |
| | WMHWVRQA | YICNVNHKPSNTKVDKKVEP | | TFKFYMPKKA | VSRSLEW | LNNFYPR |
| | PGKGLEWI | KSCDKTHTCPPCPAPEAAGA | | TELKHLQCLE | YQQKPGK | EAKVQWK |
| | SYISGDSG | PSVFLFPPKPKDTLMISRTP | | EELKPLEEAL | APKLLIY | VDNALQS |
| | YTNYADSV | EVTCVVVDVSHEDPEVKFNW | | NLAPSKNFHL | AASSLQS | GNSQESV |
| | KGRFTISR | YVDGVEVHNAKTKPREEQYN | | RPRDLISDIN | GVPSRFS | TEQDSKD |
| | DNSKNTLY | STYRVVSVLTVLHQDWLNGK | | VIVLELKGSE | GSGSGTD | STYSLSS |
| | LQMNSLRA | EYKCKVSNKALPAPIEKTIS | | TTFMCEYADE | FTLTISS | TLTLSKA |
| | EDTAVYYC | KAKGQPREPQVYTLPPSREE | | TATIVEFINR | LQPEDFA | DYEKHKV |
| | ARDRPYYY | MTKNQVSLTCLVKGFYPSDI | | WITFSQSIIS | TYYCQQY | YACEVTH |
| | YMDVWGKG | AVEWESNGQPENNYKTTPPV | | TLT (SEQ | KSYPVTF | QGLSSPV |
| | TTVTVSS | LDSDGSFFLYSKLTVDKSRW | | ID NO: 41) | GQGTKVE | TKSFNRG |
| | (SEQ ID | QQGNVFSCSVMHEALHNHYT | | | IK (SEQ | EC (SEQ |
| | NO: 591) | QKSLSLSPG (SEQ ID | | | ID NO: | ID NO: |
| | | NO: 44) | | | 1384) | 45) |
| MIAB | EVQLLESG | ASTKGPSVFPLAPSSKSTSG | GGGGS | APTSSSTKKT | DIQMTQS | RTVAAPS |
| 167 | GGLVQPGG | GTAALGCLVKDYFPEPVTVS | (SEQ | QLQLEHLLLD | PSSLSAS | VFIFPPS |
| | SLRLSCAA | WNSGALTSGVHTFPAVLQSS | ID NO: | LQMILNGINN | VGDRVTI | DEQLKSG |
| | SGFTFSDF | GLYSLSSVVTVPSSSLGTQT | 23) | YKNPKLTRML | TCRASQS | TASVVCL |
| | WMHWVRQA | YICNVNHKPSNTKVDKKVEP | | TFKFYMPKKA | VSRSLKW | LNNFYPR |
| | PGKGLEWI | KSCDKTHTCPPCPAPEAAGA | | TELKHLQCLE | YQQKPGK | EAKVQWK |
| | SYISGDSG | PSVFLFPPKPKDTLMISRTP | | EELKPLEEAL | APKLLIY | VDNALQS |
| | YTNYADSV | EVTCVVVDVSHEDPEVKFNW | | NLAPSKNFHL | AASSLQS | GNSQESV |
| | KGRFTISR | YVDGVEVHNAKTKPREEQYN | | RPRDLISDIN | GVPSRFS | TEQDSKD |
| | DNSKNTLY | STYRVVSVLTVLHQDWLNGK | | VIVLELKGSE | GSGSGTD | STYSLSS |
| | LQMNSLRA | EYKCKVSNKALPAPIEKTIS | | TTFMCEYADE | FTLTISS | TLTLSKA |
| | EDTAVYYC | KAKGQPREPQVYTLPPSREE | | TATIVEFINR | LQPEDFA | DYEKHKV |
| | ARDRPYYY | MTKNQVSLTCLVKGFYPSDI | | WITFSQSIIS | TYYCQQY | YACEVTH |
| | YMDVWGKG | AVEWESNGQPENNYKTTPPV | | TLT (SEQ | KSYPVTF | QGLSSPV |
| | TTVTVSS | LDSDGSFFLYSKLTVDKSRW | | ID NO: 41) | GQGTKVE | TKSFNRG |
| | (SEQ ID | QQGNVFSCSVMHEALHNHYT | | | IK (SEQ | EC (SEQ |
| | NO: 591) | QKSLSLSPG (SEQ ID | | | ID NO: | ID NO: |
| | | NO: 44) | | | 1385) | 45) |
| MIAB | EVQLLESG | ASTKGPSVFPLAPSSKSTSG | GGGGS | APTSSSTKKT | DIQMTQS | RTVAAPS |
| 168 | GGLVQPGG | GTAALGCLVKDYFPEPVTVS | (SEQ | QLQLEHLLLD | PSSLSAS | VFIFPPS |
| | SLRLSCAA | WNSGALTSGVHTFPAVLQSS | ID NO: | LQMILNGINN | VGDRVTI | DEQLKSG |
| | SGFTFSDF | GLYSLSSVVTVPSSSLGTQT | 23) | YKNPKLTRML | TCRASQS | TASVVCL |
| | WMHWVRQA | YICNVNHKPSNTKVDKKVEP | | TFKFYMPKKA | VSRSLLW | LNNFYPR |
| | PGKGLEWI | KSCDKTHTCPPCPAPEAAGA | | TELKHLQCLE | YQQKPGK | EAKVQWK |
| | SYISGDSG | PSVFLFPPKPKDTLMISRTP | | EELKPLEEAL | APKLLIY | VDNALQS |
| | YTNYADSV | EVTCVVVDVSHEDPEVKFNW | | NLAPSKNFHL | AASSLQS | GNSQESV |
| | KGRFTISR | YVDGVEVHNAKTKPREEQYN | | RPRDLISDIN | GVPSRFS | TEQDSKD |
| | DNSKNTLY | STYRVVSVLTVLHQDWLNGK | | VIVLELKGSE | GSGSGTD | STYSLSS |
| | LQMNSLRA | EYKCKVSNKALPAPIEKTIS | | TTFMCEYADE | FTLTISS | TLTLSKA |
| | EDTAVYYC | KAKGQPREPQVYTLPPSREE | | TATIVEFINR | LQPEDFA | DYEKHKV |
| | ARDRPYYY | MTKNQVSLTCLVKGFYPSDI | | WITFSQSIIS | TYYCQQY | YACEVTH |
| | YMDVWGKG | AVEWESNGQPENNYKTTPPV | | TLT (SEQ | KSYPVTF | QGLSSPV |
| | TTVTVSS | LDSDGSFFLYSKLTVDKSRW | | ID NO: 41) | GQGTKVE | TKSFNRG |
| | (SEQ ID | QQGNVFSCSVMHEALHNHYT | | | IK (SEQ | EC (SEQ |
| | NO: 591) | QKSLSLSPG (SEQ ID | | | ID NO: | ID NO: |
| | | NO: 44) | | | 1386) | 45) |
| MIAB | EVQLLESG | ASTKGPSVFPLAPSSKSTSG | GGGGS | APTSSSTKKT | DIQMTQS | RTVAAPS |
| 169 | GGLVQPGG | GTAALGCLVKDYFPEPVTVS | (SEQ | QLQLEHLLLD | PSSLSAS | VFIFPPS |
| | SLRLSCAA | WNSGALTSGVHTFPAVLQSS | ID NO: | LQMILNGINN | VGDRVTI | DEQLKSG |
| | SGFTFSDF | GLYSLSSVVTVPSSSLGTQT | 23) | YKNPKLTRML | TCRASQS | TASVVCL |
| | WMHWVRQA | YICNVNHKPSNTKVDKKVEP | | TFKFYMPKKA | VSRSLAW | LNNFYPR |
| | PGKGLEWI | KSCDKTHTCPPCPAPEAAGA | | TELKHLQCLE | YQQKPGK | EAKVQWK |
| | SYISGDSG | PSVFLFPPKPKDTLMISRTP | | EELKPLEEAL | APKLLIY | VDNALQS |
| | YTNYADSV | EVTCVVVDVSHEDPEVKFNW | | NLAPSKNFHL | AASSLQS | GNSQESV |
| | KGRFTISR | YVDGVEVHNAKTKPREEQYN | | RPRDLISDIN | GVPSRFS | TEQDSKD |
| | DNSKNTLY | STYRVVSVLTVLHQDWLNGK | | VIVLELKGSE | GSGSGTD | STYSLSS |
| | LQMNSLRA | EYKCKVSNKALPAPIEKTIS | | TTFMCEYADE | FTLTISS | TLTLSKA |
| | EDTAVYYC | KAKGQPREPQVYTLPPSREE | | TATIVEFINR | LQPEDFA | DYEKHKV |
| | ARDRPYYY | MTKNQVSLTCLVKGFYPSDI | | WITFSQSIIS | TYYCQQY | YACEVTH |
| | IMDVWGKG | AVEWESNGQPENNYKTTPPV | | TLT (SEQ | KSYPVTF | QGLSSPV |
| | TTVTVSS | LDSDGSFFLYSKLTVDKSRW | | ID NO: 41) | GQGTKVE | TKSFNRG |
| | (SEQ ID | QQGNVFSCSVMHEALHNHYT | | | IK (SEQ | EC (SEQ |
| | NO: | QKSLSLSPG (SEQ ID | | | ID NO: | ID NO: |
| | 1387) | NO: 44) | | | 592) | 45) |
| MIAB | EVQLLESG | ASTKGPSVFPLAPSSKSTSG | GGGGS | APTSSSTKKT | DIQMTQS | RTVAAPS |
| 170 | GGLVQPGG | GTAALGCLVKDYFPEPVTVS | (SEQ | QLQLEHLLLD | PSSLSAS | VFIFPPS |
| | SLRLSCAA | WNSGALTSGVHTFPAVLQSS | ID NO: | LQMILNGINN | VGDRVTI | DEQLKSG |
| | SGFTFSDF | GLYSLSSVVTVPSSSLGTQT | 23) | YKNPKLTRML | TCRASQS | TASVVCL |
| | WMHWVRQA | YICNVNHKPSNTKVDKKVEP | | TFKFYMPKKA | VSRSLAW | LNNFYPR |
| | PGKGLEWI | KSCDKTHTCPPCPAPEAAGA | | TELKHLQCLE | YQQKPGK | EAKVQWK |
| | SYISGDSG | PSVFLFPPKPKDTLMISRTP | | EELKPLEEAL | APKLLIY | VDNALQS |
| | YTNYADSV | EVTCVVVDVSHEDPEVKFNW | | NLAPSKNFHL | AASSLQS | GNSQESV |
| | KGRFTISR | YVDGVEVHNAKTKPREEQYN | | RPRDLISDIN | GVPSRFS | TEQDSKD |
| | DNSKNTLY | STYRVVSVLTVLHQDWLNGK | | VIVLELKGSE | GSGSGTD | STYSLSS |
| | LQMNSLRA | EYKCKVSNKALPAPIEKTIS | | TTFMCEYADE | FTLTISS | TLTLSKA |
| | EDTAVYYC | KAKGQPREPQVYTLPPSREE | | TATIVEFINR | LQPEDFA | DYEKHKV |
| | ARDRPYYY | MTKNQVSLTCLVKGFYPSDI | | WITFSQSIIS | TYYCQQY | YACEVTH |
| | WMDVWGKG | AVEWESNGQPENNYKTTPPV | | TLT (SEQ | KSYPVTF | QGLSSPV |
| | TTVTVSS | LDSDGSFFLYSKLTVDKSRW | | ID NO: 41) | GQGTKVE | TKSFNRG |
| | (SEQ ID | QQGNVFSCSVMHEALHNHYT | | | IK (SEQ | EC (SEQ |
| | NO: | QKSLSLSPG (SEQ ID | | | ID NO: | ID NO: |
| | 1388) | NO: 44) | | | 592) | 45) |
| MIAB | EVQLLESG | ASTKGPSVFPLAPSSKSTSG | GGGGS | APTSSSTKKT | DIQMTQS | RTVAAPS |
| 171 | GGLVQPGG | GTAALGCLVKDYFPEPVTVS | (SEQ | QLQLEHLLLD | PSSLSAS | VFIFPPS |
| | SLRLSCAA | WNSGALTSGVHTFPAVLQSS | ID NO: | LQMILNGINN | VGDRVTI | DEQLKSG |
| | SGFTFSDF | GLYSLSSVVTVPSSSLGTQT | 23) | YKNPKLTRML | TCRASQS | TASVVCL |
| | WMHWVRQA | YICNVNHKPSNTKVDKKVEP | | TFKFYMPKKA | VSRSLAW | LNNFYPR |
| | PGKGLEWI | KSCDKTHTCPPCPAPEAAGA | | TELKHLQCLE | YQQKPGK | EAKVQWK |
| | SYISGDSG | PSVFLFPPKPKDTLMISRTP | | EELKPLEEAL | APKLLIY | VDNALQS |
| | YTNYADSV | EVTCVVVDVSHEDPEVKFNW | | NLAPSKNFHL | AASSLQS | GNSQESV |
| | KGRFTISR | YVDGVEVHNAKTKPREEQYN | | RPRDLISDIN | GVPSRFS | TEQDSKD |
| | DNSKNTLY | STYRVVSVLTVLHQDWLNGK | | VIVLELKGSE | GSGSGTD | STYSLSS |
| | LQMNSLRA | EYKCKVSNKALPAPIEKTIS | | TTFMCEYADE | FTLTISS | TLTLSKA |
| | EDTAVYYC | KAKGQPREPQVYTLPPSREE | | TATIVEFINR | LQPEDFA | DYEKHKV |
| | ARDRPSYY | MTKNQVSLTCLVKGFYPSDI | | WITFSQSIIS | TYYCQQY | YACEVTH |
| | YMDVWGKG | AVEWESNGQPENNYKTTPPV | | TLT (SEQ | KSYPVTF | QGLSSPV |
| | TTVTVSS | LDSDGSFFLYSKLTVDKSRW | | ID NO: 41) | GQGTKVE | TKSFNRG |
| | (SEQ ID | QQGNVFSCSVMHEALHNHYT | | | IK (SEQ | EC (SEQ |
| | NO: | QKSLSLSPG (SEQ ID | | | ID NO: | ID NO: |
| | 1389) | NO: 44) | | | 592) | 45) |
| MIAB | EVQLLESG | ASTKGPSVFPLAPSSKSTSG | GGGGS | APTSSSTKKT | DIQMTQS | RTVAAPS |
| 172 | GGLVQPGG | GTAALGCLVKDYFPEPVTVS | (SEQ | QLQLEHLLLD | PSSLSAS | VFIFPPS |
| | SLRLSCAA | WNSGALTSGVHTFPAVLQSS | ID NO: | LQMILNGINN | VGDRVTI | DEQLKSG |
| | SGFTFSDF | GLYSLSSVVTVPSSSLGTQT | 23) | YKNPKLTRML | TCRASQS | TASVVCL |
| | WMHWVRQA | YICNVNHKPSNTKVDKKVEP | | TFKFYMPKKA | VSRSLAW | LNNFYPR |
| | PGKGLEWI | KSCDKTHTCPPCPAPEAAGA | | TELKHLQCLE | YQQKPGK | EAKVQWK |
| | SYISGDSG | PSVFLFPPKPKDTLMISRTP | | EELKPLEEAL | APKLLIY | VDNALQS |
| | YTNYADSV | EVTCVVVDVSHEDPEVKFNW | | NLAPSKNFHL | AASSLQS | GNSQESV |
| | KGRFTISR | YVDGVEVHNAKTKPREEQYN | | RPRDLISDIN | GVPSRFS | TEQDSKD |
| | DNSKNTLY | STYRVVSVLTVLHQDWLNGK | | VIVLELKGSE | GSGSGTD | STYSLSS |
| | LQMNSLRA | EYKCKVSNKALPAPIEKTIS | | TTFMCEYADE | FTLTISS | TLTLSKA |
| | EDTAVYYC | KAKGQPREPQVYTLPPSREE | | TATIVEFINR | LQPEDFA | DYEKHKV |
| | ARDRPTYY | MTKNQVSLTCLVKGFYPSDI | | WITFSQSIIS | TYYCQQY | YACEVTH |
| | YMDVWGKG | AVEWESNGQPENNYKTTPPV | | TLT (SEQ | KSYPVTF | QGLSSPV |
| | TTVTVSS | LDSDGSFFLYSKLTVDKSRW | | ID NO: 41) | GQGTKVE | TKSFNRG |
| | (SEQ ID | QQGNVFSCSVMHEALHNHYT | | | IK (SEQ | EC (SEQ |
| | NO: | QKSLSLSPG (SEQ ID | | | ID NO: | ID NO: |
| | 1390) | NO: 44) | | | 592) | 45) |
| MIAB | EVQLLESG | ASTKGPSVFPLAPSSKSTSG | GGGGS | APTSSSTKKT | DIQMTQS | RTVAAPS |
| 173 | GGLVQPGG | GTAALGCLVKDYFPEPVTVS | (SEQ | QLQLEHLLLD | PSSLSAS | VFIFPPS |
| | SLRLSCAA | WNSGALTSGVHTFPAVLQSS | ID NO: | LQMILNGINN | VGDRVTI | DEQLKSG |
| | SGFTFSDF | GLYSLSSVVTVPSSSLGTQT | 23) | YKNPKLTRML | TCRASQS | TASVVCL |
| | WMHWVRQA | YICNVNHKPSNTKVDKKVEP | | TFKFYMPKKA | VSRSLAW | LNNFYPR |
| | PGKGLEWI | KSCDKTHTCPPCPAPEAAGA | | TELKHLQCLE | YQQKPGK | EAKVQWK |
| | SYISGDSG | PSVFLFPPKPKDTLMISRTP | | EELKPLEEAL | APKLLIY | VDNALQS |
| | YTNYADSV | EVTCVVVDVSHEDPEVKFNW | | NLAPSKNFHL | AASSLQS | GNSQESV |
| | KGRFTISR | YVDGVEVHNAKTKPREEQYN | | RPRDLISDIN | GVPSRFS | TEQDSKD |
| | DNSKNTLY | STYRVVSVLTVLHQDWLNGK | | VIVLELKGSE | GSGSGTD | STYSLSS |
| | LQMNSLRA | EYKCKVSNKALPAPIEKTIS | | TTFMCEYADE | FTLTISS | TLTLSKA |
| | EDTAVYYC | KAKGQPREPQVYTLPPSREE | | TATIVEFINR | LQPEDFA | DYEKHKV |
| | ARDRPYYY | MTKNQVSLTCLVKGFYPSDI | | WITFSQSIIS | TYYCQQY | YACEVTH |
| | YMDVWGKG | AVEWESNGQPENNYKTTPPV | | TLT (SEQ | KSYPVTF | QGLSSPV |
| | TTVTVSS | LDSDGSFFLYSKLTVDKSRW | | ID NO: 41) | GQGTKVE | TKSFNRG |
| | (SEQ ID | QQGNVFSCSVMHEALHNHYT | | | IK (SEQ | EC (SEQ |
| | NO: 591) | QKSLSLSPG (SEQ ID | | | ID NO: | ID NO: |
| | | NO: 44) | | | 592) | 45) |
| MIAB | EVQLLESG | ASTKGPSVFPLAPSSKSTSG | GGGGS | APTSSSTKKT | DIQMTQS | RTVAAPS |
| 174 | GGLVQPGG | GTAALGCLVKDYFPEPVTVS | (SEQ | QLQLEHLLLD | PSSLSAS | VFIFPPS |
| | SLRLSCAA | WNSGALTSGVHTFPAVLQSS | ID NO: | LQMILNGINN | VGDRVTI | DEQLKSG |
| | SGFTFSDY | GLYSLSSVVTVPSSSLGTQT | 23) | YKNPKLTRML | TCRASQS | TASVVCL |
| | WMHWVRQA | YICNVNHKPSNTKVDKKVEP | | TFKFYMPKKA | VSRSLAW | LNNFYPR |
| | PGKGLEWI | KSCDKTHTCPPCPAPEAAGA | | TELKHLQCLE | YQQKPGK | EAKVQWK |
| | SYISGDSG | PSVFLFPPKPKDTLMISRTP | | EELKPLEEAL | APKLLIY | VDNALQS |
| | YTNYADSV | EVTCVVVDVSHEDPEVKFNW | | NLAPSKNFHL | AASSLQS | GNSQESV |
| | KGRFTISR | YVDGVEVHNAKTKPREEQYN | | RPRDLISDIN | GVPSRFS | TEQDSKD |
| | DNSKNTLY | STYRVVSVLTVLHQDWLNGK | | VIVLELKGSE | GSGSGTD | STYSLSS |
| | LQMNSLRA | EYKCKVSNKALPAPIEKTIS | | TTFMCEYADE | FTLTISS | TLTLSKA |
| | EDTAVYYC | KAKGQPREPQVYTLPPSREE | | TATIVEFINR | LQPEDFA | DYEKHKV |
| | ARDRPYYY | MTKNQVSLTCLVKGFYPSDI | | WITFSQSIIS | TYYCQQY | YACEVTH |
| | YMDVWGKG | AVEWESNGQPENNYKTTPPV | | TLT (SEQ | KSYPVTF | QGLSSPV |
| | TTVTVSS | LDSDGSFFLYSKLTVDKSRW | | ID NO: 41) | GQGTKVE | TKSFNRG |
| | (SEQ ID | QQGNVFSCSVMHEALHNHYT | | | IK (SEQ | EC (SEQ |
| | NO: | QKSLSLSPG (SEQ ID | | | ID NO: | ID NO: |
| | 1391) | NO: 44) | | | 592) | 45) |
| MIAB | EVQLLESG | ASTKGPSVFPLAPSSKSTSG | GGGGS | APTSSSTKKT | DIQMTQS | RTVAAPS |
| 175 | GGLVQPGG | GTAALGCLVKDYFPEPVTVS | (SEQ | QLQLEHLLLD | PSSLSAS | VFIFPPS |
| | SLRLSCAA | WNSGALTSGVHTFPAVLQSS | ID NO: | LQMILNGINN | VGDRVTI | DEQLKSG |
| | SGFTFSSY | GLYSLSSVVTVPSSSLGTQT | 23) | YKNPKLTRML | TCRASQS | TASVVCL |
| | WMHWVRQA | YICNVNHKPSNTKVDKKVEP | | TFKFYMPKKA | VSRSLAW | LNNFYPR |
| | PGKGLEWI | KSCDKTHTCPPCPAPEAAGA | | TELKHLQCLE | YQQKPGK | EAKVQWK |
| | SYISGDSG | PSVFLFPPKPKDTLMISRTP | | EELKPLEEAL | APKLLIY | VDNALQS |
| | YTNYADSV | EVTCVVVDVSHEDPEVKFNW | | NLAPSKNFHL | AASSLQS | GNSQESV |
| | KGRFTISR | YVDGVEVHNAKTKPREEQYN | | RPRDLISDIN | GVPSRFS | TEQDSKD |
| | DNSKNTLY | STYRVVSVLTVLHQDWLNGK | | VIVLELKGSE | GSGSGTD | STYSLSS |
| | LQMNSLRA | EYKCKVSNKALPAPIEKTIS | | TTFMCEYADE | FTLTISS | TLTLSKA |
| | EDTAVYYC | KAKGQPREPQVYTLPPSREE | | TATIVEFINR | LQPEDFA | DYEKHKV |
| | ARDRPYYY | MTKNQVSLTCLVKGFYPSDI | | WITFSQSIIS | TYYCQQY | YACEVTH |
| | YMDVWGKG | AVEWESNGQPENNYKTTPPV | | TLT (SEQ | KSYPVTF | QGLSSPV |
| | TTVTVSS | LDSDGSFFLYSKLTVDKSRW | | ID NO: 41) | GQGTKVE | TKSFNRG |
| | (SEQ ID | QQGNVFSCSVMHEALHNHYT | | | IK (SEQ | EC (SEQ |
| | NO: | QKSLSLSPG (SEQ ID | | | ID NO: | ID NO: |
| | 1392) | NO: 44) | | | 592) | 45) |
| MIAB | EVQLLESG | ASTKGPSVFPLAPSSKSTSG | GGGGS | APTSSSTKKT | DIQMTQS | RTVAAPS |
| 176 | GGLVQPGG | GTAALGCLVKDYFPEPVTVS | (SEQ | QLQLEHLLLD | PSSLSAS | VFIFPPS |
| | SLRLSCAA | WNSGALTSGVHTFPAVLQSS | ID NO: | LQMILNGINN | VGDRVTI | DEQLKSG |
| | SGFTFSDF | GLYSLSSVVTVPSSSLGTQT | 23) | YKNPKLTRML | TCRASQS | TASVVCL |
| | WMHWVRQA | YICNVNHKPSNTKVDKKVEP | | TFKFYMPKKA | VSRSLAW | LNNFYPR |
| | PGKGLEWI | KSCDKTHTCPPCPAPEAAGA | | TELKHLQCLE | YQQKPGK | EAKVQWK |
| | SAISGSSG | PSVFLFPPKPKDTLMISRTP | | EELKPLEEAL | APKLLIY | VDNALQS |
| | STYYADSV | EVTCVVVDVSHEDPEVKFNW | | NLAPSKNFHL | AASSLQS | GNSQESV |
| | KGRFTISR | YVDGVEVHNAKTKPREEQYN | | RPRDLISDIN | GVPSRFS | TEQDSKD |
| | DNSKNTLY | STYRVVSVLTVLHQDWLNGK | | VIVLELKGSE | GSGSGTD | STYSLSS |
| | LQMNSLRA | EYKCKVSNKALPAPIEKTIS | | TTFMCEYADE | FTLTISS | TLTLSKA |
| | EDTAVYYC | KAKGQPREPQVYTLPPSREE | | TATIVEFINR | LQPEDFA | DYEKHKV |
| | ARDRPYYY | MTKNQVSLTCLVKGFYPSDI | | WITFSQSIIS | TYYCQQY | YACEVTH |
| | YMDVWGKG | AVEWESNGQPENNYKTTPPV | | TLT (SEQ | KSYPVTF | QGLSSPV |
| | TTVTVSS | LDSDGSFFLYSKLTVDKSRW | | ID NO: 41) | GQGTKVE | TKSFNRG |
| | (SEQ ID | QQGNVFSCSVMHEALHNHYT | | | IK (SEQ | EC (SEQ |
| | NO: | QKSLSLSPG (SEQ ID | | | ID NO: | ID NO: |
| | 1393) | NO: 44) | | | 592) | 45) |
| MIAB | EVQLLESG | ASTKGPSVFPLAPSSKSTSG | GGGGS | APTSSSTKKT | DIQMTQS | RTVAAPS |
| 177 | GGLVQPGG | GTAALGCLVKDYFPEPVTVS | (SEQ | QLQLEHLLLD | PSSLSAS | VFIFPPS |
| | SLRLSCAA | WNSGALTSGVHTFPAVLQSS | ID NO: | LQMILNGINN | VGDRVTI | DEQLKSG |
| | SGFTFSDF | GLYSLSSVVTVPSSSLGTQT | 23) | YKNPKLTRML | TCRASQS | TASVVCL |
| | WMHWVRQA | YICNVNHKPSNTKVDKKVEP | | TFKFYMPKKA | VSRSLAW | LNNFYPR |
| | PGKGLEWV | KSCDKTHTCPPCPAPEAAGA | | TELKHLQCLE | YQQKPGK | EAKVQWK |
| | SAISGSGG | PSVFLFPPKPKDTLMISRTP | | EELKPLEEAL | APKLLIY | VDNALQS |
| | STYYADSV | EVTCVVVDVSHEDPEVKFNW | | NLAPSKNFHL | AASSLQS | GNSQESV |
| | KGRFTISR | YVDGVEVHNAKTKPREEQYN | | RPRDLISDIN | GVPSRFS | TEQDSKD |
| | DNSKNTLY | STYRVVSVLTVLHQDWLNGK | | VIVLELKGSE | GSGSGTD | STYSLSS |
| | LQMNSLRA | EYKCKVSNKALPAPIEKTIS | | TTFMCEYADE | FTLTISS | TLTLSKA |
| | EDTAVYYC | KAKGQPREPQVYTLPPSREE | | TATIVEFINR | LQPEDFA | DYEKHKV |
| | ARDRPYYY | MTKNQVSLTCLVKGFYPSDI | | WITFSQSIIS | TYYCQQY | YACEVTH |
| | YMDVWGKG | AVEWESNGQPENNYKTTPPV | | TLT (SEQ | KSYPVTF | QGLSSPV |
| | TTVTVSS | LDSDGSFFLYSKLTVDKSRW | | ID NO: 41) | GQGTKVE | TKSFNRG |
| | (SEQ ID | QQGNVFSCSVMHEALHNHYT | | | IK (SEQ | EC (SEQ |
| | NO: | QKSLSLSPG (SEQ ID | | | ID NO: | ID NO: |
| | 1357) | NO: 44) | | | 592) | 45) |
| MIAB | EVQLLESG | ASTKGPSVFPLAPSSKSTSG | GGGGS | APTSSSTKKT | DIQMTQS | RTVAAPS |
| 178 | GGLVQPGG | GTAALGCLVKDYFPEPVTVS | (SEQ | QLQLEHLLLD | PSSLSAS | VFIFPPS |
| | SLRLSCAA | WNSGALTSGVHTFPAVLQSS | ID NO: | LQMILNGINN | VGDRVTI | DEQLKSG |
| | SGFTFSSY | GLYSLSSVVTVPSSSLGTQT | 23) | YKNPKLTRML | TCRASQS | TASVVCL |
| | WMHWVRQA | YICNVNHKPSNTKVDKKVEP | | TFKFYMPKKA | VSRSLAW | LNNFYPR |
| | PGKGLEWI | KSCDKTHTCPPCPAPEAAGA | | TELKHLQCLE | YQQKPGK | EAKVQWK |
| | SAISGSSG | PSVFLFPPKPKDTLMISRTP | | EELKPLEEAL | APKLLIY | VDNALQS |
| | STYYADSV | EVTCVVVDVSHEDPEVKFNW | | NLAPSKNFHL | AASSLQS | GNSQESV |
| | KGRFTISR | YVDGVEVHNAKTKPREEQYN | | RPRDLISDIN | GVPSRFS | TEQDSKD |
| | DNSKNTLY | STYRVVSVLTVLHQDWLNGK | | VIVLELKGSE | GSGSGTD | STYSLSS |
| | LQMNSLRA | EYKCKVSNKALPAPIEKTIS | | TTFMCEYADE | FTLTISS | TLTLSKA |
| | EDTAVYYC | KAKGQPREPQVYTLPPSREE | | TATIVEFINR | LQPEDFA | DYEKHKV |
| | ARDRPYYY | MTKNQVSLTCLVKGFYPSDI | | WITFSQSIIS | TYYCQQY | YACEVTH |
| | YMDVWGKG | AVEWESNGQPENNYKTTPPV | | TLT (SEQ | KSYPVTF | QGLSSPV |
| | TTVTVSS | LDSDGSFFLYSKLTVDKSRW | | ID NO: 41) | GQGTKVE | TKSFNRG |
| | (SEQ ID | QQGNVFSCSVMHEALHNHYT | | | IK (SEQ | EC (SEQ |
| | NO: | QKSLSLSPG (SEQ ID | | | ID NO: | ID NO: |
| | 1394) | NO: 44) | | | 592) | 45) |
| MIAB | EVQLLESG | ASTKGPSVFPLAPSSKSTSG | GGGGS | APTSSSTKKT | DIQMTQS | RTVAAPS |
| 179 | GGLVQPGG | GTAALGCLVKDYFPEPVTVS | (SEQ | QLQLEHLLLD | PSSLSAS | VFIFPPS |
| | SLRLSCAA | WNSGALTSGVHTFPAVLQSS | ID NO: | LQMILNGINN | VGDRVTI | DEQLKSG |
| | SGFTFSSY | GLYSLSSVVTVPSSSLGTQT | 23) | YKNPKLTRML | TCRASQS | TASVVCL |
| | WMHWVRQA | YICNVNHKPSNTKVDKKVEP | | TFKFYMPKKA | ISRYLAW | LNNFYPR |
| | PGKGLEWV | KSCDKTHTCPPCPAPEAAGA | | TELKHLQCLE | YQQKPGK | EAKVQWK |
| | SAISGSGG | PSVFLFPPKPKDTLMISRTP | | EELKPLEEAL | APKLLIY | VDNALQS |
| | STYYADSV | EVTCVVVDVSHEDPEVKFNW | | NLAPSKNFHL | AASSLQS | GNSQESV |
| | KGRFTISR | YVDGVEVHNAKTKPREEQYN | | RPRDLISDIN | GVPSRFS | TEQDSKD |
| | DNSKNTLY | STYRVVSVLTVLHQDWLNGK | | VIVLELKGSE | GSGSGTD | STYSLSS |
| | LQMNSLRA | EYKCKVSNKALPAPIEKTIS | | TTFMCEYADE | FTLTISS | TLTLSKA |
| | EDTAVYYC | KAKGQPREPQVYTLPPSREE | | TATIVEFINR | LQPEDFA | DYEKHKV |
| | ARDRPYYY | MTKNQVSLTCLVKGFYPSDI | | WITFSQSIIS | TYYCQQY | YACEVTH |
| | YMDVWGKG | AVEWESNGQPENNYKTTPPV | | TLT (SEQ | KSYPVTF | QGLSSPV |
| | TTVTVSS | LDSDGSFFLYSKLTVDKSRW | | ID NO: 41) | GQGTKVE | TKSFNRG |
| | (SEQ ID | QQGNVFSCSVMHEALHNHYT | | | IK (SEQ | EC (SEQ |
| | NO: | QKSLSLSPG (SEQ ID | | | ID NO: | ID NO: |
| | 1395) | NO: 44) | | | 1368) | 45) |
| MIAB | EVQLLESG | ASTKGPSVFPLAPSSKSTSG | GGGGS | APTSSSTKKT | DIQMTQS | RTVAAPS |
| 180 | GGLVQPGG | GTAALGCLVKDYFPEPVTVS | (SEQ | QLQLEHLLLD | PSSLSAS | VFIFPPS |
| | SLRLSCAA | WNSGALTSGVHTFPAVLQSS | ID NO: | LQMILNGINN | VGDRVTI | DEQLKSG |
| | SGFTFSSY | GLYSLSSVVTVPSSSLGTQT | 23) | YKNPKLTRML | TCRASQS | TASVVCL |
| | WMHWVRQA | YICNVNHKPSNTKVDKKVEP | | TFKFYMPKKA | VSRSLAW | LNNFYPR |
| | PGKGLEWV | KSCDKTHTCPPCPAPEAAGA | | TELKHLQCLE | YQQKPGK | EAKVQWK |
| | SAISGSGG | PSVFLFPPKPKDTLMISRTP | | EELKPLEEAL | APKLLIY | VDNALQS |
| | STYYADSV | EVTCVVVDVSHEDPEVKFNW | | NLAPSKNFHL | AASSLQS | GNSQESV |
| | KGRFTISR | YVDGVEVHNAKTKPREEQYN | | RPRDLISDIN | GVPSRFS | TEQDSKD |
| | DNSKNTLY | STYRVVSVLTVLHQDWLNGK | | VIVLELKGSE | GSGSGTD | STYSLSS |
| | LQMNSLRA | EYKCKVSNKALPAPIEKTIS | | TTFMCEYADE | FTLTISS | TLTLSKA |
| | EDTAVYYC | KAKGQPREPQVYTLPPSREE | | TATIVEFINR | LQPEDFA | DYEKHKV |
| | ARDRPYYY | MTKNQVSLTCLVKGFYPSDI | | WITFSQSIIS | TYYCQQY | YACEVTH |
| | YMDVWGKG | AVEWESNGQPENNYKTTPPV | | TLT (SEQ | KSYPVTF | QGLSSPV |
| | TTVTVSS | LDSDGSFFLYSKLTVDKSRW | | ID NO: 41) | GQGTKVE | TKSFNRG |
| | (SEQ ID | QQGNVFSCSVMHEALHNHYT | | | IK (SEQ | EC (SEQ |
| | NO: | QKSLSLSPG (SEQ ID | | | ID NO: | ID NO: |
| | 1395) | NO: 44) | | | 592) | 45) |
| MIAB | EVQLLESG | ASTKGPSVFPLAPSSKSTSG | GGGGS | APTSSSTKKT | DIQMTQS | RTVAAPS |
| 181 | GGLVQPGG | GTAALGCLVKDYFPEPVTVS | (SEç | QLQLEHLLLD | PSSLSAS | VFIFPPS |
| | SLRLSCAA | WNSGALTSGVHTFPAVLQSS | ID NO: | LQMILNGINN | VGDRVTI | DEQLKSG |
| | SGFTFSSY | GLYSLSSVVTVPSSSLGTQT | 23) | YKNPKLTRML | TCRASQS | TASVVCL |
| | WMHWVRQA | YICNVNHKPSNTKVDKKVEP | | TFKFYMPKKA | ISRYLAW | LNNFYPR |
| | PGKGLEWV | KSCDKTHTCPPCPAPEAAGA | | TELKHLQCLE | YQQKPGK | EAKVQWK |
| | SAISGSGG | PSVFLFPPKPKDTLMISRTP | | EELKPLEEAL | APKLLIY | VDNALQS |
| | STYYADSV | EVTCVVVDVSHEDPEVKFNW | | NLAPSKNFHL | AASSLQS | GNSQESV |
| | KGRFTISR | YVDGVEVHNAKTKPREEQYN | | RPRDLISDIN | GVPSRFS | TEQDSKD |
| | DNSKNTLY | STYRVVSVLTVLHQDWLNGK | | VIVLELKGSE | GSGSGTD | STYSLSS |
| | LQMNSLRA | EYKCKVSNKALPAPIEKTIS | | TTFMCEYADE | FTLTISS | TLTLSKA |
| | EDTAVYYC | KAKGQPREPQVYTLPPSREE | | TATIVEFINR | LQPEDFA | DYEKHKV |
| | ARDRPYYY | MTKNQVSLTCLVKGFYPSDI | | WITFSQSIIS | TYYCQQY | YACEVTH |
| | YMDVWGKG | AVEWESNGQPENNYKTTPPV | | TLT (SEQ | KSYPVTF | QGLSSPV |
| | TTVTVSS | LDSDGSFFLYSKLTVDKSRW | | ID NO: 41) | GQGTKVE | TKSFNRG |
| | (SEQ ID | QQGNVFSCSVMHEALHNHYT | | | IK (SEQ | EC (SEQ |
| | NO: | QKSLSLSPG (SEQ ID | | | ID NO: | ID NO: |
| | 1395) | NO: 44) | | | 1368) | 45) |
| MIAB | EVQLLESG | ASTKGPSVFPLAPSSKSTSG | GGGGS | APTSSSTKKT | DIQMTQS | RTVAAPS |
| 182 | GGLVQPGG | GTAALGCLVKDYFPEPVTVS | (SEQ | QLQLEHLLLD | PSSLSAS | VFIFPPS |
| | SLRLSCAA | WNSGALTSGVHTFPAVLQSS | ID NO: | LQMILNGINN | VGDRVTI | DEQLKSG |
| | SGFTFSSY | GLYSLSSVVTVPSSSLGTQT | 23) | YKNPKLTRML | TCRASQS | TASVVCL |
| | WMHWVRQA | YICNVNHKPSNTKVDKKVEP | | TFKFYMPKKA | ISRSLAW | LNNFYPR |
| | PGKGLEWV | KSCDKTHTCPPCPAPEAAGA | | TELKHLQCLE | YQQKPGK | EAKVQWK |
| | SAISGSGG | PSVFLFPPKPKDTLMISRTP | | EELKPLEEAL | APKLLIY | VDNALQS |
| | STYYADSV | EVTCVVVDVSHEDPEVKFNW | | NLAPSKNFHL | AASSLQS | GNSQESV |
| | KGRFTISR | YVDGVEVHNAKTKPREEQYN | | RPRDLISDIN | GVPSRFS | TEQDSKD |
| | DNSKNTLY | STYRVVSVLTVLHQDWLNGK | | VIVLELKGSE | GSGSGTD | STYSLSS |
| | LQMNSLRA | EYKCKVSNKALPAPIEKTIS | | TTFMCEYADE | FTLTISS | TLTLSKA |
| | EDTAVYYC | KAKGQPREPQVYTLPPSREE | | TATIVEFINR | LQPEDFA | DYEKHKV |
| | ARDRPYYY | MTKNQVSLTCLVKGFYPSDI | | WITFSQSIIS | TYYCQQY | YACEVTH |
| | YMDVWGKG | AVEWESNGQPENNYKTTPPV | | TLT (SEQ | KSYPVTF | QGLSSPV |
| | TTVTVSS | LDSDGSFFLYSKLTVDKSRW | | ID NO: 41) | GQGTKVE | TKSFNRG |
| | (SEQ ID | QQGNVFSCSVMHEALHNHYT | | | IK (SEQ | EC (SEQ |
| | NO: | QKSLSLSPG (SEQ ID | | | ID NO: | ID NO: |
| | 1395) | NO: 44) | | | 1363) | 45) |
| MIAB | EVQLLESG | ASTKGPSVFPLAPSSKSTSG | GGGGS | APTSSSTKKT | DIQMTQS | RTVAAPS |
| 183 | GGLVQPGG | GTAALGCLVKDYFPEPVTVS | (SEQ | QLQLEHLLLD | PSSLSAS | VFIFPPS |
| | SLRLSCAA | WNSGALTSGVHTFPAVLQSS | ID NO: | LQMILNGINN | VGDRVTI | DEQLKSG |
| | SGFTFSSY | GLYSLSSVVTVPSSSLGTQT | 23) | YKNPKLTRML | TCRASQS | TASVVCL |
| | WMHWVRQA | YICNVNHKPSNTKVDKKVEP | | TFKFYMPKKA | VSSSLAW | LNNFYPR |
| | PGKGLEWV | KSCDKTHTCPPCPAPEAAGA | | TELKHLQCLE | YQQKPGK | EAKVQWK |
| | SAISGSGG | PSVFLFPPKPKDTLMISRTP | | EELKPLEEAL | APKLLIY | VDNALQS |
| | STYYADSV | EVTCVVVDVSHEDPEVKFNW | | NLAPSKNFHL | AASSLQS | GNSQESV |
| | KGRFTISR | YVDGVEVHNAKTKPREEQYN | | RPRDLISDIN | GVPSRFS | TEQDSKD |
| | DNSKNTLY | STYRVVSVLTVLHQDWLNGK | | VIVLELKGSE | GSGSGTD | STYSLSS |
| | LQMNSLRA | EYKCKVSNKALPAPIEKTIS | | TTFMCEYADE | FTLTISS | TLTLSKA |
| | EDTAVYYC | KAKGQPREPQVYTLPPSREE | | TATIVEFINR | LQPEDFA | DYEKHKV |
| | ARDRPYYY | MTKNQVSLTCLVKGFYPSDI | | WITFSQSIIS | TYYCQQY | YACEVTH |
| | YMDVWGKG | AVEWESNGQPENNYKTTPPV | | TLT (SEQ | KSYPVTF | QGLSSPV |
| | TTVTVSS | LDSDGSFFLYSKLTVDKSRW | | ID NO: 41) | GQGTKVE | TKSFNRG |
| | (SEQ ID | QQGNVFSCSVMHEALHNHYT | | | IK (SEQ | EC (SEQ |
| | NO: | QKSLSLSPG (SEQ ID | | | ID NO: | ID NO: |
| | 1395) | NO: 44) | | | 1364) | 45) |
| MIAB | EVQLLESG | ASTKGPSVFPLAPSSKSTSG | GGGGS | APTSSSTKKT | DIQMTQS | RTVAAPS |
| 184 | GGLVQPGG | GTAALGCLVKDYFPEPVTVS | (SEQ | QLQLEHLLLD | PSSLSAS | VFIFPPS |
| | SLRLSCAA | WNSGALTSGVHTFPAVLQSS | ID NO: | LQMILNGINN | VGDRVTI | DEQLKSG |
| | SGFTFSSY | GLYSLSSVVTVPSSSLGTQT | 23) | YKNPKLTRML | TCRASQS | TASVVCL |
| | WMHWVRQA | YICNVNHKPSNTKVDKKVEP | | TFKFYMPKKA | ISSSLAW | LNNFYPR |
| | PGKGLEWV | KSCDKTHTCPPCPAPEAAGA | | TELKHLQCLE | YQQKPGK | EAKVQWK |
| | SAISGSGG | PSVFLFPPKPKDTLMISRTP | | EELKPLEEAL | APKLLIY | VDNALQS |
| | STYYADSV | EVTCVVVDVSHEDPEVKFNW | | NLAPSKNFHL | AASSLQS | GNSQESV |
| | KGRFTISR | YVDGVEVHNAKTKPREEQYN | | RPRDLISDIN | GVPSRFS | TEQDSKD |
| | DNSKNTLY | STYRVVSVLTVLHQDWLNGK | | VIVLELKGSE | GSGSGTD | STYSLSS |
| | LQMNSLRA | EYKCKVSNKALPAPIEKTIS | | TTFMCEYADE | FTLTISS | TLTLSKA |
| | EDTAVYYC | KAKGQPREPQVYTLPPSREE | | TATIVEFINR | LQPEDFA | DYEKHKV |
| | ARDRPYYY | MTKNQVSLTCLVKGFYPSDI | | WITFSQSIIS | TYYCQQY | YACEVTH |
| | YMDVWGKG | AVEWESNGQPENNYKTTPPV | | TLT (SEQ | KSYPVTF | QGLSSPV |
| | TTVTVSS | LDSDGSFFLYSKLTVDKSRW | | ID NO: 41) | GQGTKVE | TKSFNRG |
| | (SEQ ID | QQGNVFSCSVMHEALHNHYT | | | IK (SEQ | EC (SEQ |
| | NO: | QKSLSLSPG (SEQ ID | | | ID NO: | ID NO: |
| | 1395) | NO: 44) | | | 1367) | 45) |
| MIAB | EVQLLESG | ASTKGPSVFPLAPSSKSTSG | GGGGS | APTSSSTKKT | DIQMTQS | RTVAAPS |
| 185 | GGLVQPGG | GTAALGCLVKDYFPEPVTVS | (SEQ | QLQLEHLLLD | PSSLSAS | VFIFPPS |
| | SLRLSCAA | WNSGALTSGVHTFPAVLQSS | ID NO: | LQMILNGINN | VGDRVTI | DEQLKSG |
| | SGFTFSSY | GLYSLSSVVTVPSSSLGTQT | 23) | YKNPKLTRML | TCRASQS | TASVVCL |
| | WMHWVRQA | YICNVNHKPSNTKVDKKVEP | | TFKFYMPKKA | ISRSLAW | LNNFYPR |
| | PGKGLEWI | KSCDKTHTCPPCPAPEAAGA | | TELKHLQCLE | YQQKPGK | EAKVQWK |
| | SYISGDSG | PSVFLFPPKPKDTLMISRTP | | EELKPLEEAL | APKLLIY | VDNALQS |
| | YTNYADSV | EVTCVVVDVSHEDPEVKFNW | | NLAPSKNFHL | AASSLQS | GNSQESV |
| | KGRFTISR | YVDGVEVHNAKTKPREEQYN | | RPRDLISDIN | GVPSRFS | TEQDSKD |
| | DNSKNTLY | STYRVVSVLTVLHQDWLNGK | | VIVLELKGSE | GSGSGTD | STYSLSS |
| | LQMNSLRA | EYKCKVSNKALPAPIEKTIS | | TTFMCEYADE | FTLTISS | TLTLSKA |
| | EDTAVYYC | KAKGQPREPQVYTLPPSREE | | TATIVEFINR | LQPEDFA | DYEKHKV |
| | ARDRPYYY | MTKNQVSLTCLVKGFYPSDI | | WITFSQSIIS | TYYCQQY | YACEVTH |
| | IMDVWGKG | AVEWESNGQPENNYKTTPPV | | TLT (SEQ | KSYPVTF | QGLSSPV |
| | TTVTVSS | LDSDGSFFLYSKLTVDKSRW | | ID NO: 41) | GQGTKVE | TKSFNRG |
| | (SEQ ID | QQGNVFSCSVMHEALHNHYT | | | IK (SEQ | EC (SEQ |
| | NO: | QKSLSLSPG (SEQ ID | | | ID NO: | ID NO: |
| | 1396) | NO: 44) | | | 1363) | 45) |
| MIAB | EVQLLESG | ASTKGPSVFPLAPSSKSTSG | GGGGS | APTSSSTKKT | DIQMTQS | RTVAAPS |
| 186 | GGLVQPGG | GTAALGCLVKDYFPEPVTVS | (SEQ | QLQLEHLLLD | PSSLSAS | VFIFPPS |
| | SLRLSCAA | WNSGALTSGVHTFPAVLQSS | ID NO: | LQMILNGINN | VGDRVTI | DEQLKSG |
| | SGFTFSSY | GLYSLSSVVTVPSSSLGTQT | 23) | YKNPKLTRML | TCRASQS | TASVVCL |
| | WMHWVRQA | YICNVNHKPSNTKVDKKVEP | | TFKFYMPKKA | VSSSLAW | LNNFYPR |
| | PGKGLEWI | KSCDKTHTCPPCPAPEAAGA | | TELKHLQCLE | YQQKPGK | EAKVQWK |
| | SYISGDSG | PSVFLFPPKPKDTLMISRTP | | EELKPLEEAL | APKLLIY | VDNALQS |
| | YTNYADSV | EVTCVVVDVSHEDPEVKFNW | | NLAPSKNFHL | AASSLQS | GNSQESV |
| | KGRFTISR | YVDGVEVHNAKTKPREEQYN | | RPRDLISDIN | GVPSRFS | TEQDSKD |
| | DNSKNTLY | STYRVVSVLTVLHQDWLNGK | | VIVLELKGSE | GSGSGTD | STYSLSS |
| | LQMNSLRA | EYKCKVSNKALPAPIEKTIS | | TTFMCEYADE | FTLTISS | TLTLSKA |
| | EDTAVYYC | KAKGQPREPQVYTLPPSREE | | TATIVEFINR | LQPEDFA | DYEKHKV |
| | ARDRPYYY | MTKNQVSLTCLVKGFYPSDI | | WITFSQSIIS | TYYCQQY | YACEVTH |
| | IMDVWGKG | AVEWESNGQPENNYKTTPPV | | TLT (SEQ | KSYPVTF | QGLSSPV |
| | TTVTVSS | LDSDGSFFLYSKLTVDKSRW | | ID NO: 41) | GQGTKVE | TKSFNRG |
| | (SEQ ID | QQGNVFSCSVMHEALHNHYT | | | IK (SEQ | EC (SEQ |
| | NO: | QKSLSLSPG (SEQ ID | | | ID NO: | ID NO: |
| | 1396) | NO: 44) | | | 1364) | 45) |
| MIAB | EVQLLESG | ASTKGPSVFPLAPSSKSTSG | GGGGS | APTSSSTKKT | DIQMTQS | RTVAAPS |
| 187 | GGLVQPGG | GTAALGCLVKDYFPEPVTVS | (SEQ | QLQLEHLLLD | PSSLSAS | VFIFPPS |
| | SLRLSCAA | WNSGALTSGVHTFPAVLQSS | ID NO: | LQMILNGINN | VGDRVTI | DEQLKSG |
| | SGFTFSSY | GLYSLSSVVTVPSSSLGTQT | 23) | YKNPKLTRML | TCRASQS | TASVVCL |
| | WMHWVRQA | YICNVNHKPSNTKVDKKVEP | | TFKFYMPKKA | ISSSLAW | LNNFYPR |
| | PGKGLEWI | KSCDKTHTCPPCPAPEAAGA | | TELKHLQCLE | YQQKPGK | EAKVQWK |
| | SYISGDSG | PSVFLFPPKPKDTLMISRTP | | EELKPLEEAL | APKLLIY | VDNALQS |
| | YTNYADSV | EVTCVVVDVSHEDPEVKFNW | | NLAPSKNFHL | AASSLQS | GNSQESV |
| | KGRFTISR | YVDGVEVHNAKTKPREEQYN | | RPRDLISDIN | GVPSRFS | TEQDSKD |
| | DNSKNTLY | STYRVVSVLTVLHQDWLNGK | | VIVLELKGSE | GSGSGTD | STYSLSS |
| | LQMNSLRA | EYKCKVSNKALPAPIEKTIS | | TTFMCEYADE | FTLTISS | TLTLSKA |
| | EDTAVYYC | KAKGQPREPQVYTLPPSREE | | TATIVEFINR | LQPEDFA | DYEKHKV |
| | ARDRPYYY | MTKNQVSLTCLVKGFYPSDI | | WITFSQSIIS | TYYCQQY | YACEVTH |
| | IMDVWGKG | AVEWESNGQPENNYKTTPPV | | TLT (SEQ | KSYPVTF | QGLSSPV |
| | TTVTVSS | LDSDGSFFLYSKLTVDKSRW | | ID NO: 41) | GQGTKVE | TKSFNRG |
| | (SEQ ID | QQGNVFSCSVMHEALHNHYT | | | IK (SEQ | EC (SEQ |
| | NO: | QKSLSLSPG (SEQ ID | | | ID NO: | ID NO: |
| | 1396) | NO: 44) | | | 1367) | 45) |
| MIAB | EVQLLESG | ASTKGPSVFPLAPSSKSTSG | GGGGS | APTSSSTKKT | DIQMTQS | RTVAAPS |
| 188 | GGLVQPGG | GTAALGCLVKDYFPEPVTVS | (SEQ | QLQLEHLLLD | PSSLSAS | VFIFPPS |
| | SLRLSCAA | WNSGALTSGVHTFPAVLQSS | ID NO: | LQMILNGINN | VGDRVTI | DEQLKSG |
| | SGFTFSDF | GLYSLSSVVTVPSSSLGTQT | 23) | YKNPKLTRML | TCRASQS | TASVVCL |
| | WMHWVRQA | YICNVNHKPSNTKVDKKVEP | | TFKFYMPKKA | ISRSLAW | LNNFYPR |
| | PGKGLEWV | KSCDKTHTCPPCPAPEAAGA | | TELKHLQCLE | YQQKPGK | EAKVQWK |
| | SAISGSGG | PSVFLFPPKPKDTLMISRTP | | EELKPLEEAL | APKLLIY | VDNALQS |
| | STYYADSV | EVTCVVVDVSHEDPEVKFNW | | NLAPSKNFHL | AASSLQS | GNSQESV |
| | KGRFTISR | YVDGVEVHNAKTKPREEQYN | | RPRDLISDIN | GVPSRFS | TEQDSKD |
| | DNSKNTLY | STYRVVSVLTVLHQDWLNGK | | VIVLELKGSE | GSGSGTD | STYSLSS |
| | LQMNSLRA | EYKCKVSNKALPAPIEKTIS | | TTFMCEYADE | FTLTISS | TLTLSKA |
| | EDTAVYYC | KAKGQPREPQVYTLPPSREE | | TATIVEFINR | LQPEDFA | DYEKHKV |
| | ARDRPYYY | MTKNQVSLTCLVKGFYPSDI | | WITFSQSIIS | TYYCQQY | YACEVTH |
| | IMDVWGKG | AVEWESNGQPENNYKTTPPV | | TLT (SEQ | KSYPVTF | QGLSSPV |
| | TTVTVSS | LDSDGSFFLYSKLTVDKSRW | | ID NO: 41) | GQGTKVE | TKSFNRG |
| | (SEQ ID | QQGNVFSCSVMHEALHNHYT | | | IK (SEQ | EC (SEQ |
| | NO: | QKSLSLSPG (SEQ ID | | | ID NO: | ID NO: |
| | 1397) | NO: 44) | | | 1363) | 45) |
| MIAB | EVQLLESG | ASTKGPSVFPLAPSSKSTSG | GGGGS | APTSSSTKKT | DIQMTQS | RTVAAPS |
| 189 | GGLVQPGG | GTAALGCLVKDYFPEPVTVS | (SEQ | QLQLEHLLLD | PSSLSAS | VFIFPPS |
| | SLRLSCAA | WNSGALTSGVHTFPAVLQSS | ID NO: | LQMILNGINN | VGDRVTI | DEQLKSG |
| | SGFTFSDF | GLYSLSSVVTVPSSSLGTQT | 23) | YKNPKLTRML | TCRASQS | TASVVCL |
| | WMHWVRQA | YICNVNHKPSNTKVDKKVEP | | TFKFYMPKKA | VSSSLAW | LNNFYPR |
| | PGKGLEWV | KSCDKTHTCPPCPAPEAAGA | | TELKHLQCLE | YQQKPGK | EAKVQWK |
| | SAISGSGG | PSVFLFPPKPKDTLMISRTP | | EELKPLEEAL | APKLLIY | VDNALQS |
| | STYYADSV | EVTCVVVDVSHEDPEVKFNW | | NLAPSKNFHL | AASSLQS | GNSQESV |
| | KGRFTISR | YVDGVEVHNAKTKPREEQYN | | RPRDLISDIN | GVPSRFS | TEQDSKD |
| | DNSKNTLY | STYRVVSVLTVLHQDWLNGK | | VIVLELKGSE | GSGSGTD | STYSLSS |
| | LQMNSLRA | EYKCKVSNKALPAPIEKTIS | | TTFMCEYADE | FTLTISS | TLTLSKA |
| | EDTAVYYC | KAKGQPREPQVYTLPPSREE | | TATIVEFINR | LQPEDFA | DYEKHKV |
| | ARDRPYYY | MTKNQVSLTCLVKGFYPSDI | | WITFSQSIIS | TYYCQQY | YACEVTH |
| | IMDVWGKG | AVEWESNGQPENNYKTTPPV | | TLT (SEQ | KSYPVTF | QGLSSPV |
| | TTVTVSS | LDSDGSFFLYSKLTVDKSRW | | ID NO: 41) | GQGTKVE | TKSFNRG |
| | (SEQ ID | QQGNVFSCSVMHEALHNHYT | | | IK (SEQ | EC (SEQ |
| | NO: | QKSLSLSPG (SEQ ID | | | ID NO: | ID NO: |
| | 1397) | NO: 44) | | | 1364) | 45) |
| MIAB | EVQLLESG | ASTKGPSVFPLAPSSKSTSG | GGGGS | APTSSSTKKT | DIQMTQS | RTVAAPS |
| 190 | GGLVQPGG | GTAALGCLVKDYFPEPVTVS | (SEQ | QLQLEHLLLD | PSSLSAS | VFIFPPS |
| | SLRLSCAA | WNSGALTSGVHTFPAVLQSS | ID NO: | LQMILNGINN | VGDRVTI | DEQLKSG |
| | SGFTFSDF | GLYSLSSVVTVPSSSLGTQT | 23) | YKNPKLTRML | TCRASQS | TASVVCL |
| | WMHWVRQA | YICNVNHKPSNTKVDKKVEP | | TFKFYMPKKA | ISSSLAW | LNNFYPR |
| | PGKGLEWV | KSCDKTHTCPPCPAPEAAGA | | TELKHLQCLE | YQQKPGK | EAKVQWK |
| | SAISGSGG | PSVFLFPPKPKDTLMISRTP | | EELKPLEEAL | APKLLIY | VDNALQS |
| | STYYADSV | EVTCVVVDVSHEDPEVKFNW | | NLAPSKNFHL | AASSLQS | GNSQESV |
| | KGRFTISR | YVDGVEVHNAKTKPREEQYN | | RPRDLISDIN | GVPSRFS | TEQDSKD |
| | DNSKNTLY | STYRVVSVLTVLHQDWLNGK | | VIVLELKGSE | GSGSGTD | STYSLSS |
| | LQMNSLRA | EYKCKVSNKALPAPIEKTIS | | TTFMCEYADE | FTLTISS | TLTLSKA |
| | EDTAVYYC | KAKGQPREPQVYTLPPSREE | | TATIVEFINR | LQPEDFA | DYEKHKV |
| | ARDRPYYY | MTKNQVSLTCLVKGFYPSDI | | WITFSQSIIS | TYYCQQY | YACEVTH |
| | IMDVWGKG | AVEWESNGQPENNYKTTPPV | | TLT (SEQ | KSYPVTF | QGLSSPV |
| | TTVTVSS | LDSDGSFFLYSKLTVDKSRW | | ID NO: 41) | GQGTKVE | TKSFNRG |
| | (SEQ ID | QQGNVFSCSVMHEALHNHYT | | | IK (SEQ | EC (SEQ |
| | NO: | QKSLSLSPG (SEQ ID | | | ID NO: | ID NO: |
| | 1397) | NO: 44) | | | 1367) | 45) |
| MIAB | EVQLLESG | ASTKGPSVFPLAPSSKSTSG | GGGGS | APTSSSTKKT | DIQMTQS | RTVAAPS |
| 191 | GGLVQPGG | GTAALGCLVKDYFPEPVTVS | (SEQ | QLQLEHLLLD | PSSLSAS | VFIFPPS |
| | SLRLSCAA | WNSGALTSGVHTFPAVLQSS | ID NO: | LQMILNGINN | VGDRVTI | DEQLKSG |
| | SGFTFSSY | GLYSLSSVVTVPSSSLGTQT | 23) | YKNPKLTRML | TCRASQS | TASVVCL |
| | WMHWVRQA | YICNVNHKPSNTKVDKKVEP | | TFKFYMPKKA | ISRSLAW | LNNFYPR |
| | PGKGLEWV | KSCDKTHTCPPCPAPEAAGA | | TELKHLQCLE | YQQKPGK | EAKVQWK |
| | SAISGSGG | PSVFLFPPKPKDTLMISRTP | | EELKPLEEAL | APKLLIY | VDNALQS |
| | STYYADSV | EVTCVVVDVSHEDPEVKFNW | | NLAPSKNFHL | AASSLQS | GNSQESV |
| | KGRFTISR | YVDGVEVHNAKTKPREEQYN | | RPRDLISDIN | GVPSRFS | TEQDSKD |
| | DNSKNTLY | STYRVVSVLTVLHQDWLNGK | | VIVLELKGSE | GSGSGTD | STYSLSS |
| | LQMNSLRA | EYKCKVSNKALPAPIEKTIS | | TTFMCEYADE | FTLTISS | TLTLSKA |
| | EDTAVYYC | KAKGQPREPQVYTLPPSREE | | TATIVEFINR | LQPEDFA | DYEKHKV |
| | ARDRPYYY | MTKNQVSLTCLVKGFYPSDI | | WITFSQSIIS | TYYCQQY | YACEVTH |
| | IMDVWGKG | AVEWESNGQPENNYKTTPPV | | TLT (SEQ | KSYPVTF | QGLSSPV |
| | TTVTVSS | LDSDGSFFLYSKLTVDKSRW | | ID NO: 41) | GQGTKVE | TKSFNRG |
| | (SEQ ID | QQGNVFSCSVMHEALHNHYT | | | IK (SEQ | EC (SEQ |
| | NO: | QKSLSLSPG (SEQ ID | | | ID NO: | ID NO: |
| | 1398) | NO: 44) | | | 1363) | 45) |
| MIAB | EVQLLESG | ASTKGPSVFPLAPSSKSTSG | GGGGS | APTSSSTKKT | DIQMTQS | RTVAAPS |
| 192 | GGLVQPGG | GTAALGCLVKDYFPEPVTVS | (SEQ | QLQLEHLLLD | PSSLSAS | VFIFPPS |
| | SLRLSCAA | WNSGALTSGVHTFPAVLQSS | ID NO: | LQMILNGINN | VGDRVTI | DEQLKSG |
| | SGFTFSSY | GLYSLSSVVTVPSSSLGTQT | 23) | YKNPKLTRML | TCRASQS | TASVVCL |
| | WMHWVRQA | YICNVNHKPSNTKVDKKVEP | | TFKFYMPKKA | VSSSLAW | LNNFYPR |
| | PGKGLEWV | KSCDKTHTCPPCPAPEAAGA | | TELKHLQCLE | YQQKPGK | EAKVQWK |
| | SAISGSGG | PSVFLFPPKPKDTLMISRTP | | EELKPLEEAL | APKLLIY | VDNALQS |
| | STYYADSV | EVTCVVVDVSHEDPEVKFNW | | NLAPSKNFHL | AASSLQS | GNSQESV |
| | KGRFTISR | YVDGVEVHNAKTKPREEQYN | | RPRDLISDIN | GVPSRFS | TEQDSKD |
| | DNSKNTLY | STYRVVSVLTVLHQDWLNGK | | VIVLELKGSE | GSGSGTD | STYSLSS |
| | LQMNSLRA | EYKCKVSNKALPAPIEKTIS | | TTFMCEYADE | FTLTISS | TLTLSKA |
| | EDTAVYYC | KAKGQPREPQVYTLPPSREE | | TATIVEFINR | LQPEDFA | DYEKHKV |
| | ARDRPYYY | MTKNQVSLTCLVKGFYPSDI | | WITFSQSIIS | TYYCQQY | YACEVTH |
| | IMDVWGKG | AVEWESNGQPENNYKTTPPV | | TLT (SEQ | KSYPVTF | QGLSSPV |
| | TTVTVSS | LDSDGSFFLYSKLTVDKSRW | | ID NO: 41) | GQGTKVE | TKSFNRG |
| | (SEQ ID | QQGNVFSCSVMHEALHNHYT | | | IK (SEQ | EC (SEQ |
| | NO: | QKSLSLSPG (SEQ ID | | | ID NO: | ID NO: |
| | 1398) | NO: 44) | | | 1364) | 45) |
| MIAB | EVQLLESG | ASTKGPSVFPLAPSSKSTSG | GGGGS | APTSSSTKKT | DIQMTQS | RTVAAPS |
| 193 | GGLVQPGG | GTAALGCLVKDYFPEPVTVS | (SEQ | QLQLEHLLLD | PSSLSAS | VFIFPPS |
| | SLRLSCAA | WNSGALTSGVHTFPAVLQSS | ID NO: | LQMILNGINN | VGDRVTI | DEQLKSG |
| | SGFTFSSY | GLYSLSSVVTVPSSSLGTQT | 23) | YKNPKLTRML | TCRASQS | TASVVCL |
| | WMHWVRQA | YICNVNHKPSNTKVDKKVEP | | TFKFYMPKKA | ISSSLAW | LNNFYPR |
| | PGKGLEWV | KSCDKTHTCPPCPAPEAAGA | | TELKHLQCLE | YQQKPGK | EAKVQWK |
| | SAISGSGG | PSVFLFPPKPKDTLMISRTP | | EELKPLEEAL | APKLLIY | VDNALQS |
| | STYYADSV | EVTCVVVDVSHEDPEVKFNW | | NLAPSKNFHL | AASSLQS | GNSQESV |
| | KGRFTISR | YVDGVEVHNAKTKPREEQYN | | RPRDLISDIN | GVPSRFS | TEQDSKD |
| | DNSKNTLY | STYRVVSVLTVLHQDWLNGK | | VIVLELKGSE | GSGSGTD | STYSLSS |
| | LQMNSLRA | EYKCKVSNKALPAPIEKTIS | | TTFMCEYADE | FTLTISS | TLTLSKA |
| | EDTAVYYC | KAKGQPREPQVYTLPPSREE | | TATIVEFINR | LQPEDFA | DYEKHKV |
| | ARDRPYYY | MTKNQVSLTCLVKGFYPSDI | | WITFSQSIIS | TYYCQQY | YACEVTH |
| | IMDVWGKG | AVEWESNGQPENNYKTTPPV | | TLT (SEQ | KSYPVTF | QGLSSPV |
| | TTVTVSS | LDSDGSFFLYSKLTVDKSRW | | ID NO: 41) | GQGTKVE | TKSFNRG |
| | (SEQ ID | QQGNVFSCSVMHEALHNHYT | | | IK (SEQ | EC (SEQ |
| | NO: | QKSLSLSPG (SEQ ID | | | ID NO: | ID NO: |
| | 1398) | NO: 44) | | | 1367) | 45) |
| MIAB | EVQLLESG | ASTKGPSVFPLAPSSKSTSG | GGGGS | APTSSSTKKT | DIQMTQS | RTVAAPS |
| 194 | GGLVQPGG | GTAALGCLVKDYFPEPVTVS | (SEQ | QLQLEHLLLD | PSSLSAS | VFIFPPS |
| | SLRLSCAA | WNSGALTSGVHTFPAVLQSS | ID NO: | LQMILNGINN | VGDRVTI | DEQLKSG |
| | SGFTFSDF | GLYSLSSVVTVPSSSLGTQT | 23) | YKNPKLTRML | TCRASQS | TASVVCL |
| | WMHWVRQA | YICNVNHKPSNTKVDKKVEP | | TFKFYMPKKA | ISRSLAW | LNNFYPR |
| | PGKGLEWI | KSCDKTHTCPPCPAPEAAGA | | TELKHLQCLE | YQQKPGK | EAKVQWK |
| | SYISGDSG | PSVFLFPPKPKDTLMISRTP | | EELKPLEEAL | APKLLIY | VDNALQS |
| | YTNYADSV | EVTCVVVDVSHEDPEVKFNW | | NLAPSKNFHL | AASSLQS | GNSQESV |
| | KGRFTISR | YVDGVEVHNAKTKPREEQYN | | RPRDLISDIN | GVPSRFS | TEQDSKD |
| | DNSKNTLY | STYRVVSVLTVLHQDWLNGK | | VIVLELKGSE | GSGSGTD | STYSLSS |
| | LQMNSLRA | EYKCKVSNKALPAPIEKTIS | | TTFMCEYADE | FTLTISS | TLTLSKA |
| | EDTAVYYC | KAKGQPREPQVYTLPPSREE | | TATIVEFINR | LQPEDFA | DYEKHKV |
| | ARDRPYYY | MTKNQVSLTCLVKGFYPSDI | | WITFSQSIIS | TYYCQQY | YACEVTH |
| | IMDVWGKG | AVEWESNGQPENNYKTTPPV | | TLT (SEQ | KSYPVTF | QGLSSPV |
| | TTVTVSS | LDSDGSFFLYSKLTVDKSRW | | ID NO: 41) | GQGTKVE | TKSFNRG |
| | (SEQ ID | QQGNVFSCSVMHEALHNHYT | | | IK (SEQ | EC (SEQ |
| | NO: | QKSLSLSPG (SEQ ID | | | ID NO: | ID NO: |
| | 1387) | NO: 44) | | | 1363) | 45) |
| MIAB | EVQLLESG | ASTKGPSVFPLAPSSKSTSG | GGGGS | APTSSSTKKT | DIQMTQS | RTVAAPS |
| 195 | GGLVQPGG | GTAALGCLVKDYFPEPVTVS | (SEQ | QLQLEHLLLD | PSSLSAS | VFIFPPS |
| | SLRLSCAA | WNSGALTSGVHTFPAVLQSS | ID NO: | LQMILNGINN | VGDRVTI | DEQLKSG |
| | SGFTFSDF | GLYSLSSVVTVPSSSLGTQT | 23) | YKNPKLTRML | TCRASQS | TASVVCL |
| | WMHWVRQA | YICNVNHKPSNTKVDKKVEP | | TFKFYMPKKA | VSSSLAW | LNNFYPR |
| | PGKGLEWI | KSCDKTHTCPPCPAPEAAGA | | TELKHLQCLE | YQQKPGK | EAKVQWK |
| | SYISGDSG | PSVFLFPPKPKDTLMISRTP | | EELKPLEEAL | APKLLIY | VDNALQS |
| | YTNYADSV | EVTCVVVDVSHEDPEVKFNW | | NLAPSKNFHL | AASSLQS | GNSQESV |
| | KGRFTISR | YVDGVEVHNAKTKPREEQYN | | RPRDLISDIN | GVPSRFS | TEQDSKD |
| | DNSKNTLY | STYRVVSVLTVLHQDWLNGK | | VIVLELKGSE | GSGSGTD | STYSLSS |
| | LQMNSLRA | EYKCKVSNKALPAPIEKTIS | | TTFMCEYADE | FTLTISS | TLTLSKA |
| | EDTAVYYC | KAKGQPREPQVYTLPPSREE | | TATIVEFINR | LQPEDFA | DYEKHKV |
| | ARDRPYYY | MTKNQVSLTCLVKGFYPSDI | | WITFSQSIIS | TYYCQQY | YACEVTH |
| | IMDVWGKG | AVEWESNGQPENNYKTTPPV | | TLT (SEQ | KSYPVTF | QGLSSPV |
| | TTVTVSS | LDSDGSFFLYSKLTVDKSRW | | ID NO: 41) | GQGTKVE | TKSFNRG |
| | (SEQ ID | QQGNVFSCSVMHEALHNHYT | | | IK (SEQ | EC (SEQ |
| | NO: | QKSLSLSPG (SEQ ID | | | ID NO: | ID NO: |
| | 1387) | NO: 44) | | | 1364) | 45) |
| MIAB | EVQLLESG | ASTKGPSVFPLAPSSKSTSG | GGGGS | APTSSSTKKT | DIQMTQS | RTVAAPS |
| 196 | GGLVQPGG | GTAALGCLVKDYFPEPVTVS | (SEQ | QLQLEHLLLD | PSSLSAS | VFIFPPS |
| | SLRLSCAA | WNSGALTSGVHTFPAVLQSS | ID NO: | LQMILNGINN | VGDRVTI | DEQLKSG |
| | SGFTFSDF | GLYSLSSVVTVPSSSLGTQT | 23) | YKNPKLTRML | TCRASQS | TASVVCL |
| | WMHWVRQA | YICNVNHKPSNTKVDKKVEP | | TFKFYMPKKA | ISSSLAW | LNNFYPR |
| | PGKGLEWI | KSCDKTHTCPPCPAPEAAGA | | TELKHLQCLE | YQQKPGK | EAKVQWK |
| | SYISGDSG | PSVFLFPPKPKDTLMISRTP | | EELKPLEEAL | APKLLIY | VDNALQS |
| | YTNYADSV | EVTCVVVDVSHEDPEVKFNW | | NLAPSKNFHL | AASSLQS | GNSQESV |
| | KGRFTISR | YVDGVEVHNAKTKPREEQYN | | RPRDLISDIN | GVPSRFS | TEQDSKD |
| | DNSKNTLY | STYRVVSVLTVLHQDWLNGK | | VIVLELKGSE | GSGSGTD | STYSLSS |
| | LQMNSLRA | EYKCKVSNKALPAPIEKTIS | | TTFMCEYADE | FTLTISS | TLTLSKA |
| | EDTAVYYC | KAKGQPREPQVYTLPPSREE | | TATIVEFINR | LQPEDFA | DYEKHKV |
| | ARDRPYYY | MTKNQVSLTCLVKGFYPSDI | | WITFSQSIIS | TYYCQQY | YACEVTH |
| | IMDVWGKG | AVEWESNGQPENNYKTTPPV | | TLT (SEQ | KSYPVTF | QGLSSPV |
| | TTVTVSS | LDSDGSFFLYSKLTVDKSRW | | ID NO: 41) | GQGTKVE | TKSFNRG |
| | (SEQ ID | QQGNVFSCSVMHEALHNHYT | | | IK (SEQ | EC (SEQ |
| | NO: | QKSLSLSPG (SEQ ID | | | ID NO: | ID NO: |
| | 1387) | NO: 44) | | | 1367) | 45) |
| MIAB | EVQLLESG | ASTKGPSVFPLAPSSKSTSG | GGGGS | APTSSSTKKT | DIQMTQS | RTVAAPS |
| 197 | GGLVQPGG | GTAALGCLVKDYFPEPVTVS | (SEQ | QLQLEHLLLD | PSSLSAS | VFIFPPS |
| | SLRLSCAA | WNSGALTSGVHTFPAVLQSS | ID NO: | LQMILNGINN | VGDRVTI | DEQLKSG |
| | SGFTFSDF | GLYSLSSVVTVPSSSLGTQT | 23) | YKNPKLTRML | TCRASQS | TASVVCL |
| | WMHWVRQA | YICNVNHKPSNTKVDKKVEP | | TFKFYMPKKA | ISRSLAW | LNNFYPR |
| | PGKGLEWI | KSCDKTHTCPPCPAPEAAGA | | TELKHLQCLE | YQQKPGK | EAKVQWK |
| | SYISGDSG | PSVFLFPPKPKDTLMISRTP | | EELKPLEEAL | APKLLIY | VDNALQS |
| | YTNYADSV | EVTCVVVDVSHEDPEVKFNW | | NLAPSKNFHL | AASSLQS | GNSQESV |
| | KGRFTISR | YVDGVEVHNAKTKPREEQYN | | RPRDLISDIN | GVPSRFS | TEQDSKD |
| | DNSKNTLY | STYRVVSVLTVLHQDWLNGK | | VIVLELKGSE | GSGSGTD | STYSLSS |
| | LQMNSLRA | EYKCKVSNKALPAPIEKTIS | | TTFMCEYADE | FTLTISS | TLTLSKA |
| | EDTAVYYC | KAKGQPREPQVYTLPPSREE | | TATIVEFINR | LQPEDFA | DYEKHKV |
| | ARDRPYYY | MTKNQVSLTCLVKGFYPSDI | | WITFSQSIIS | TYYCQQY | YACEVTH |
| | IMDVWGKG | AVEWESNGQPENNYKTTPPV | | TLT (SEQ | KSYPVTF | QGLSSPV |
| | TTVTVSS | LDSDGSFFLYSKLTVDKSRW | | ID NO: 41) | GQGTKVE | TKSFNRG |
| | (SEQ ID | QQGNVFSCSVMHEALHNHYT | | | IK (SEQ | EC (SEQ |
| | NO: | QKSLSLSPG (SEQ ID | | | ID NO: | ID NO: |
| | 1387) | NO: 44) | | | 1363) | 45) |
| MIAB | EVQLLESG | ASTKGPSVFPLAPSSKSTSG | GGGGS | APTSSSTKKT | DIQMTQS | RTVAAPS |
| 198 | GGLVQPGG | GTAALGCLVKDYFPEPVTVS | (SEQ | QLQLEHLLLD | PSSLSAS | VFIFPPS |
| | SLRLSCAA | WNSGALTSGVHTFPAVLQSS | ID NO: | LQMILNGINN | VGDRVTI | DEQLKSG |
| | SGFTFSDF | GLYSLSSVVTVPSSSLGTQT | 23) | YKNPKLTRML | TCRASQS | TASVVCL |
| | WMHWVRQA | YICNVNHKPSNTKVDKKVEP | | TFKFYMPKKA | VSRSLAW | LNNFYPR |
| | PGKGLEWI | KSCDKTHTCPPCPAPEAAGA | | TELKHLQCLE | YQQKPGK | EAKVQWK |
| | SYISGDSG | PSVFLFPPKPKDTLMISRTP | | EELKPLEEAL | APKLLIY | VDNALQS |
| | YTNYADSV | EVTCVVVDVSHEDPEVKFNW | | NLAPSKNFHL | AASSLQS | GNSQESV |
| | KGRFTISR | YVDGVEVHNAKTKPREEQYN | | RPRDLISDIN | GVPSRFS | TEQDSKD |
| | DNSKNTLY | STYRVVSVLTVLHQDWLNGK | | VIVLELKGSE | GSGSGTD | STYSLSS |
| | LQMNSLRA | EYKCKVSNKALPAPIEKTIS | | TTFMCEYADE | FTLTISS | TLTLSKA |
| | EDTAVYYC | KAKGQPREPQVYTLPPSREE | | TATIVEFINR | LQPEDFA | DYEKHKV |
| | ARDRPYYY | MTKNQVSLTCLVKGFYPSDI | | WITFSQSIIS | TYYCQQY | YACEVTH |
| | IMDVWGKG | AVEWESNGQPENNYKTTPPV | | TLT (SEQ | KSYPVTF | QGLSSPV |
| | TTVTVSS | LDSDGSFFLYSKLTVDKSRW | | ID NO: 41) | GQGTKVE | TKSFNRG |
| | (SEQ ID | QQGNVFSCSVMHEALHNHYT | | | IK (SEQ | EC (SEQ |
| | NO: | QKSLSLSPG (SEQ ID | | | ID NO: | ID NO: |
| | 1387) | NO: 44) | | | 592) | 45) |
| MIAB | EVQLLESG | ASTKGPSVFPLAPSSKSTSG | GGGGS | APTSSSTKKT | EIVMTQS | RTVAAPS |
| 205 | GGLVQPGG | GTAALGCLVKDYFPEPVTVS | (SEQ | QLQLEHLLLD | PATLSVS | VFIFPPS |
| | SLRLSCAA | WNSGALTSGVHTFPAVLQSS | ID NO: | LQMILNGINN | PGERATL | DEQLKSG |
| | SGFTFDDY | GLYSLSSVVTVPSSSLGTQT | 23) | YKNPKLTRML | SCRASQS | TASVVCL |
| | AMHWVRQA | YICNVNHKPSNTKVDKKVEP | | TFKFYMPKKA | VYSNLAW | LNNFYPR |
| | PGKGLEWV | KSCDKTHTCPPCPAPEAAGA | | TELKHLQCLE | YQQKPGQ | EAKVQWK |
| | ASITSSSA | PSVFLFPPKPKDTLMISRTP | | EELKPLEEAL | APRLLIY | VDNALQS |
| | FIDYADSV | EVTCVVVDVSHEDPEVKFNW | | NLAPSKNFHL | RASTRAT | GNSQESV |
| | KGRFTISR | YVDGVEVHNAKTKPREEQYN | | RPRDLISDIN | GIPARFS | TEQDSKD |
| | DNSKNTLY | STYRVVSVLTVLHQDWLNGK | | VIVLELKGSE | GSGSGTE | STYSLSS |
| | LQMNSLRA | EYKCKVSNKALPAPIEKTIS | | TTFMCEYADE | FTLTISS | TLTLSKA |
| | EDTAVYYC | KAKGQPREPQVYTLPPSREE | | TATIVEFINR | LQSEDFA | DYEKHKV |
| | ARERVDWF | MTKNQVSLTCLVKGFYPSDI | | WITFSQSIIS | VYYCQQY | YACEVTH |
| | SYFDLWGQ | AVEWESNGQPENNYKTTPPV | | TLT (SEQ | HIWPPTF | QGLSSPV |
| | GTLVTVSS | LDSDGSFFLYSKLTVDKSRW | | ID NO: 41) | GQGTKVE | TKSFNRG |
| | (SEQ ID | QQGNVFSCSVMHEALHNHYT | | | IK (SEQ | EC (SEQ |
| | NO: | QKSLSLSPG (SEQ ID | | | ID NO: | ID NO: |
| | 1533) | NO: 44) | | | 690) | 45) |
| MIAB | EVQLLESG | ASTKGPSVFPLAPSSKSTSG | GGGGS | APTSSSTKKT | EIVMTQS | RTVAAPS |
| 206 | GGLVQPGG | GTAALGCLVKDYFPEPVTVS | (SEQ | QLQLEHLLLD | PATLSVS | VFIFPPS |
| | SLRLSCAA | WNSGALTSGVHTFPAVLQSS | ID NO: | LQMILNGINN | PGERATL | DEQLKSG |
| | SGFTFDDY | GLYSLSSVVTVPSSSLGTQT | 23) | YKNPKLTRML | SCRASQS | TASVVCL |
| | AMHWVRQA | YICNVNHKPSNTKVDKKVEP | | TFKFYMPKKA | VYSNLAW | LNNFYPR |
| | PGKGLEWV | KSCDKTHTCPPCPAPEAAGA | | TELKHLQCLE | YQQKPGQ | EAKVQWK |
| | ASITSSSA | PSVFLFPPKPKDTLMISRTP | | EELKPLEEAL | APRLLIY | VDNALQS |
| | FIDYADSV | EVTCVVVDVSHEDPEVKFNW | | NLAPSKNFHL | RASTRAT | GNSQESV |
| | KGRFTISR | YVDGVEVHNAKTKPREEQYN | | RPRDLISDIN | GIPARFS | TEQDSKD |
| | DNSKNTLY | STYRVVSVLTVLHQDWLNGK | | VIVLELKGSE | GSGSGTE | STYSLSS |
| | LQMNSLRA | EYKCKVSNKALPAPIEKTIS | | TTFMCEYADE | FTLTISS | TLTLSKA |
| | EDTAVYYC | KAKGQPREPQVYTLPPSREE | | TATIVEFINR | LQSEDFA | DYEKHKV |
| | ARERVDWY | MTKNQVSLTCLVKGFYPSDI | | WITFSQSIIS | VYYCQQY | YACEVTH |
| | SYFDLWGQ | AVEWESNGQPENNYKTTPPV | | TLT (SEQ | HIWPPTF | QGLSSPV |
| | GTLVTVSS | LDSDGSFFLYSKLTVDKSRW | | ID NO: 41) | GQGTKVE | TKSFNRG |
| | (SEQ ID | QQGNVFSCSVMHEALHNHYT | | | IK (SEQ | EC (SEQ |
| | NO: | QKSLSLSPG (SEQ ID | | | ID NO: | ID NO: |
| | 1534) | NO: 44) | | | 690) | 45) |
| MIAB | EVQLLESG | ASTKGPSVFPLAPSSKSTSG | GGGGS | APTSSSTKKT | EIVMTQS | RTVAAPS |
| 207 | GGLVQPGG | GTAALGCLVKDYFPEPVTVS | (SEQ | QLQLEHLLLD | PATLSVS | VFIFPPS |
| | SLRLSCAA | WNSGALTSGVHTFPAVLQSS | ID NO: | LQMILNGINN | PGERATL | DEQLKSG |
| | SGFTFDDY | GLYSLSSVVTVPSSSLGTQT | 23) | YKNPKLTRML | SCRASQS | TASVVCL |
| | AMHWVRQA | YICNVNHKPSNTKVDKKVEP | | TFKFYMPKKA | VYSNLVW | LNNFYPR |
| | PGKGLEWV | KSCDKTHTCPPCPAPEAAGA | | TELKHLQCLE | YQQKPGQ | EAKVQWK |
| | ASITSSSA | PSVFLFPPKPKDTLMISRTP | | EELKPLEEAL | APRLLIY | VDNALQS |
| | FIDYADSV | EVTCVVVDVSHEDPEVKFNW | | NLAPSKNFHL | RASTRAT | GNSQESV |
| | KGRFTISR | YVDGVEVHNAKTKPREEQYN | | RPRDLISDIN | GIPARFS | TEQDSKD |
| | DNSKNTLY | STYRVVSVLTVLHQDWLNGK | | VIVLELKGSE | GSGSGTE | STYSLSS |
| | LQMNSLRA | EYKCKVSNKALPAPIEKTIS | | TTFMCEYADE | FTLTISS | TLTLSKA |
| | EDTAVYYC | KAKGQPREPQVYTLPPSREE | | TATIVEFINR | LQSEDFA | DYEKHKV |
| | ARERVDWN | MTKNQVSLTCLVKGFYPSDI | | WITFSQSIIS | VYYCQQY | YACEVTH |
| | SYFDLWGQ | AVEWESNGQPENNYKTTPPV | | TLT (SEQ | HIWPPTF | QGLSSPV |
| | GTLVTVSS | LDSDGSFFLYSKLTVDKSRW | | ID NO: 41) | GQGTKVE | TKSFNRG |
| | (SEQ ID | QQGNVFSCSVMHEALHNHYT | | | IK (SEQ | EC (SEQ |
| | NO: 664) | QKSLSLSPG (SEQ ID | | | ID NO: | ID NO: |
| | | NO: 44) | | | 1535) | 45) |
| MIAB | EVQLLESG | ASTKGPSVFPLAPSSKSTSG | GGGGS | APTSSSTKKT | EIVMTQS | RTVAAPS |
| 208 | GGLVQPGG | GTAALGCLVKDYFPEPVTVS | (SEQ | QLQLEHLLLD | PATLSVS | VFIFPPS |
| | SLRLSCAA | WNSGALTSGVHTFPAVLQSS | ID NO: | LQMILNGINN | PGERATL | DEQLKSG |
| | SGFTFDDY | GLYSLSSVVTVPSSSLGTQT | 23) | YKNPKLTRML | SCRASQS | TASVVCL |
| | AMHWVRQA | YICNVNHKPSNTKVDKKVEP | | TFKFYMPKKA | VYSNLAW | LNNFYPR |
| | PGKGLEWV | KSCDKTHTCPPCPAPEAAGA | | TELKHLQCLE | YQQKPGQ | EAKVQWK |
| | ASITSSSA | PSVFLFPPKPKDTLMISRTP | | EELKPLEEAL | APRLLIY | VDNALQS |
| | FIDYADSV | EVTCVVVDVSHEDPEVKFNW | | NLAPSKNFHL | DASTRAT | GNSQESV |
| | KGRFTISR | YVDGVEVHNAKTKPREEQYN | | RPRDLISDIN | GIPARFS | TEQDSKD |
| | DNSKNTLY | STYRVVSVLTVLHQDWLNGK | | VIVLELKGSE | GSGSGTE | STYSLSS |
| | LQMNSLRA | EYKCKVSNKALPAPIEKTIS | | TTFMCEYADE | FTLTISS | TLTLSKA |
| | EDTAVYYC | KAKGQPREPQVYTLPPSREE | | TATIVEFINR | LQSEDFA | DYEKHKV |
| | ARERVDWN | MTKNQVSLTCLVKGFYPSDI | | WITFSQSIIS | VYYCQQY | YACEVTH |
| | SYFDLWGQ | AVEWESNGQPENNYKTTPPV | | TLT (SEQ | HIWPPTF | QGLSSPV |
| | GTLVTVSS | LDSDGSFFLYSKLTVDKSRW | | ID NO: 41) | GQGTKVE | TKSFNRG |
| | (SEQ ID | QQGNVFSCSVMHEALHNHYT | | | IK (SEQ | EC (SEQ |
| | NO: 664) | QKSLSLSPG (SEQ ID | | | ID NO: | ID NO: |
| | | NO: 44) | | | 1536) | 45) |
| MIAB | EVQLLESG | ASTKGPSVFPLAPSSKSTSG | GGGGS | APTSSSTKKT | EIVMTQS | RTVAAPS |
| 209 | GGLVQPGG | GTAALGCLVKDYFPEPVTVS | (SEQ | QLQLEHLLLD | PATLSVS | VFIFPPS |
| | SLRLSCAA | WNSGALTSGVHTFPAVLQSS | ID NO: | LQMILNGINN | PGERATL | DEQLKSG |
| | SGFTFDDY | GLYSLSSVVTVPSSSLGTQT | 23) | YKNPKLTRML | SCRASQS | TASVVCL |
| | AMHWVRQA | YICNVNHKPSNTKVDKKVEP | | TFKFYMPKKA | VYSNYLA | LNNFYPR |
| | PGKGLEWV | KSCDKTHTCPPCPAPEAAGA | | TELKHLQCLE | WYQQKPG | EAKVQWK |
| | ASITSSSA | PSVFLFPPKPKDTLMISRTP | | EELKPLEEAL | QAPRLLI | VDNALQS |
| | FIDYADSV | EVTCVVVDVSHEDPEVKFNW | | NLAPSKNFHL | YRASTRA | GNSQESV |
| | KGRFTISR | YVDGVEVHNAKTKPREEQYN | | RPRDLISDIN | TGIPARF | TEQDSKD |
| | DNSKNTLY | STYRVVSVLTVLHQDWLNGK | | VIVLELKGSE | SGSGSGT | STYSLSS |
| | LQMNSLRA | EYKCKVSNKALPAPIEKTIS | | TTFMCEYADE | EFTLTIS | TLTLSKA |
| | EDTAVYYC | KAKGQPREPQVYTLPPSREE | | TATIVEFINR | SLQSEDF | DYEKHKV |
| | ARERVDWN | MTKNQVSLTCLVKGFYPSDI | | WITFSQSIIS | AVYYCQQ | YACEVTH |
| | SYFDLWGQ | AVEWESNGQPENNYKTTPPV | | TLT (SEQ | YSHWPPT | QGLSSPV |
| | GTLVTVSS | LDSDGSFFLYSKLTVDKSRW | | ID NO: 41) | FGQGTKV | TKSFNRG |
| | (SEQ ID | QQGNVFSCSVMHEALHNHYT | | | EIK | EC (SEQ |
| | NO: 664) | QKSLSLSPG (SEQ ID | | | (SEQ ID | ID NO: |
| | | NO: 44) | | | NO: | 45) |
| | | | | | 1537) | |
| PRNT | EVQLLESG | ASTKGPSVFPLAPSSKSTSG | GGGGS | APTSSSTKKT | EIVMTQS | RTVAAPS |
| 2 | GGLVKPGG | GTAALGCLVKDYFPEPVTVS | (SEQ | QLQLEHLLLD | PATLSVS | VFIFPPS |
| | SLRLSCAA | WNSGALTSGVHTFPAVLQSS | ID NO: | LQMILNGINN | PGERATL | DEQLKSG |
| | SGFTFDDY | GLYSLSSVVTVPSSSLGTQT | 23) | YKNPKLTRML | SCRASQG | TASVVCL |
| | AMHWVRQA | YICNVNHKPSNTKVDKKVEP | | TFKFYMPKKA | ISNSYLA | LNNFYPR |
| | PGKGLEWV | KSCDKTHTCPPCPAPEAAGA | | TELKHLQCLE | WYQQKPG | EAKVQWK |
| | ASITSSSA | PSVFLFPPKPKDTLMISRTP | | EELKPLEEAL | QAPRLLI | VDNALQS |
| | FIDYAASV | EVTCVVVDVSHEDPEVKFNW | | NLAPSKNFHL | YGASTRA | GNSQESV |
| | KGRFTISR | YVDGVEVHNAKTKPREEQYN | | RPRDLISDIN | TGIPARF | TEQDSKD |
| | DDSKNTLY | STYRVVSVLTVLHQDWLNGK | | VIVLELKGSE | SGSGSGT | STYSLSS |
| | LQMNSLKT | EYKCKVSNKALPAPIEKTIS | | TTFMCEYADE | EFTLTIS | TLTLSKA |
| | EDTAVYYC | KAKGQPREPQVYTLPPSREE | | TATIVEFINR | SLQSEDF | DYEKHKV |
| | ARERVDWN | MTKNQVSLTCLVKGFYPSDI | | WITFSQSIIS | AVYYCQQ | YACEVTH |
| | SYFDLWGR | AVEWESNGQPENNYKTTPPV | | TLT (SEQ | YYTYPPT | QGLSSPV |
| | GTLVTVSS | LDSDGSFFLYSKLTVDKSRW | | ID NO: 41) | FGPGTKV | TKSFNRG |
| | (SEQ ID | QQGNVFSCSVMHEALHNHYT | | | DIK | EC (SEQ |
| | NO: 599) | QKSLSLSPG (SEQ ID | | | (SEQ ID | ID NO: |
| | | NO: 44) | | | NO: | 45) |
| | | | | | 600) | |
| PRNT | EVQLLESG | ASTKGPSVFPLAPSSKSTSG | GGGGS | APTSSSTKKT | DIQMTQS | RTVAAPS |
| 1 | GGLVQPGG | GTAALGCLVKDYFPEPVTVS | (SEQ | QLQLEHLLLD | PSSLSAS | VFIFPPS |
| | SLRLSCAA | WNSGALTSGVHTFPAVLQSS | ID NO: | LQMILNGINN | VGDRVTI | DEQLKSG |
| | SGFTFSDF | GLYSLSSVVTVPSSSLGTQT | 23) | YKNPKLTRML | TCRASQS | TASVVCL |
| | WMHWVRQA | YICNVNHKPSNTKVDKKVEP | | TFKFYMPKKA | VSRSLAW | LNNFYPR |
| | PGKGLEWI | KSCDKTHTCPPCPAPEAAGA | | TELKHLQCLE | YQQKPGK | EAKVQWK |
| | SYISGDSG | PSVFLFPPKPKDTLMISRTP | | EELKPLEEAL | APKLLIY | VDNALQS |
| | YTNYADSV | EVTCVVVDVSHEDPEVKFNW | | NLAPSKNFHL | AASSLQS | GNSQESV |
| | KGRFTISR | YVDGVEVHNAKTKPREEQYN | | RPRDLISDIN | GVPSRFS | TEQDSKD |
| | DNSKNTLY | STYRVVSVLTVLHQDWLNGK | | VIVLELKGSE | GSGSGTD | STYSLSS |
| | LQMNSLRA | EYKCKVSNKALPAPIEKTIS | | TTFMCEYADE | FTLTISS | TLTLSKA |
| | EDTAVYYC | KAKGQPREPQVYTLPPSREE | | TATIVEFINR | LQPEDFA | DYEKHKV |
| | ARDRPYYY | MTKNQVSLTCLVKGFYPSDI | | WITFSQSIIS | TYYCQQY | YACEVTH |
| | YMDVWGKG | AVEWESNGQPENNYKTTPPV | | TLT (SEQ | KSYPVTF | QGLSSPV |
| | TTVTVSS | LDSDGSFFLYSKLTVDKSRW | | ID NO: 41) | GQGTKVE | TKSFNRG |
| | (SEQ ID | QQGNVFSCSVMHEALHNHYT | | | IK (SEQ | EC (SEQ |
| | NO: 591) | QKSLSLSPG (SEQ ID | | | ID NO: | ID NO: |
| | | NO: 44) | | | 592) | 45) |

[0499] In some embodiments, the therapeutic comprises one or more sequences, or a combination thereof, selected from the Table 10. In some embodiments, the therapeutic comprises the peptides of SEQ ID NOs: 1387, 44, 23, 41, 1363, and 45.

[0500] In additional embodiments, the MAdCAM antibody comprises an IL-2 mutein fused to the N-terminus of an Fc heavy chain, wherein the Fc is further fused at its C-terminus to a MAdCAM scFv, and has one or more of the sequences as set forth in the following table

TABLE 11

| | | IL-2M- | | | | | |
|---|---|---|---|---|---|---|---|
| | | Fc | | | | Intra | |
| | | Linker | | Fc-scFv | scFv VH | scFv | scFv VK |
| Ab | IL-2M Seq | Seq | Fc Domain Seq | Linker | Seq | Linker | Seq |
| MIAB199 | APTSSSTKKT | GGGGSG | DKTHTCPPCPAPEAAG | GGGGS | EVQLLESGGG | GGGGSG | DIQMTQSPS |
| | QLQLEHLLLD | GGGSGG | APSVFLFPPKPKDTLM | (SEQ ID | LVQPGGSLRL | GGGSGG | SLSASVGDR |
| | LQMILNGINN | GGS | ISRTPEVTCVVVDVSH | NO: 23) | SCAASGFTFS | GGSGGG | VTITCRASQ |
| | YKNPKLTRML | (SEQ | EDPEVKFNWYVDGVEV | | DFWMHWVRQA | GS | SVSRSLAWY |
| | TFKFYMPKKA | ID NO: | HNAKTKPREEQYNSTY | | PGKGLEWISY | (SEQ | QQKPGKAPK |
| | TELKHLQCLE | 30) | RVVSVLTVLHQDWLNG | | ISGDSGYTNY | ID NO: | LLIYAASSL |
| | EELKPLEEAL | | KEYKCKVSNKALPAPI | | ADSVKGRFTI | 22) | QSGVPSRFS |
| | NLAPSKNFHL | | EKTISKAKGQPREPQV | | SRDNSKNTLY | | GSGSGTDFT |
| | RPRDLISDIN | | YTLPPSREEMTKNQVS | | LQMNSLRAED | | LTISSLQPE |
| | VIVLELKGSE | | LTCLVKGFYPSDIAVE | | TAVYYCARDR | | DFATYYCQQ |
| | TTFMCEYADE | | WESNGQPENNYKTTPP | | PYYYYMDVWG | | YKSYPVTFG |
| | TATIVEFINR | | VLDSDGSFFLYSKLTV | | KGTTVTVSS | | QGTKVEIK |
| | WITFSQSIIS | | DKSRWQQGNVFSCSVM | | (SEQ ID | | (SEQ ID |
| | TLT (SEQ | | HEALHNHYTQKSLSLS | | NO: 591) | | NO: 592) |
| | ID NO: 41) | | PG (SEQ ID NO: | | | | |
| | | | 21) | | | | |
| MIAB200 | APTSSSTKKT | GGGGSG | DKTHTCPPCPAPEAAG | GGGGSGG | EVQLLESGGG | GGGGSG | DIQMTQSPS |
| | QLQLEHLLLD | GGGSGG | APSVFLFPPKPKDTLM | GGS | LVQPGGSLRL | GGGSGG | SLSASVGDR |
| | LQMILNGINN | GGS | ISRTPEVTCVVVDVSH | (SEQ ID | SCAASGFTFS | GGSGGG | VTITCRASQ |
| | YKNPKLTRML | (SEQ | EDPEVKFNWYVDGVEV | NO: | DFWMHWVRQA | GS | SVSRSLAWY |
| | TFKFYMPKKA | ID NO: | HNAKTKPREEQYNSTY | 619) | PGKGLEWISY | (SEQ | QQKPGKAPK |
| | TELKHLQCLE | 30) | RVVSVLTVLHQDWLNG | | ISGDSGYTNY | ID NO: | LLIYAASSL |
| | EELKPLEEAL | | KEYKCKVSNKALPAPI | | ADSVKGRFTI | 22) | QSGVPSRFS |
| | NLAPSKNFHL | | EKTISKAKGQPREPQV | | SRDNSKNTLY | | GSGSGTDFT |
| | RPRDLISDIN | | YTLPPSREEMTKNQVS | | LQMNSLRAED | | LTISSLQPE |
| | VIVLELKGSE | | LTCLVKGFYPSDIAVE | | TAVYYCARDR | | DFATYYCQQ |
| | TTFMCEYADE | | WESNGQPENNYKTTPP | | PYYYYMDVWG | | YKSYPVTFG |
| | TATIVEFINR | | VLDSDGSFFLYSKLTV | | KGTTVTVSS | | QGTKVEIK |
| | WITFSQSIIS | | DKSRWQQGNVFSCSVM | | (SEQ ID | | (SEQ ID |
| | TLT (SEQ | | HEALHNHYTQKSLSLS | | NO: 591) | | NO: 592) |
| | ID NO: 41) | | PG (SEQ ID NO: | | | | |
| | | | 21) | | | | |
| MIAB201 | APTSSSTKKT | GGGGSG | DKTHTCPPCPAPEAAG | GGGGSGG | EVQLLESGGG | GGGGSG | DIQMTQSPS |
| | QLQLEHLLLD | GGGSGG | APSVFLFPPKPKDTLM | GGSGGGG | LVQPGGSLRL | GGGSGG | SLSASVGDR |
| | LQMILNGINN | GGS | ISRTPEVTCVVVDVSH | S (SEQ | SCAASGFTFS | GGSGGG | VTITCRASQ |
| | YKNPKLTRML | (SEQ | EDPEVKFNWYVDGVEV | ID NO: | DFWMHWVRQA | GS | SVSRSLAWY |
| | TFKFYMPKKA | ID NO: | HNAKTKPREEQYNSTY | 30) | PGKGLEWISY | (SEQ | QQKPGKAPK |
| | TELKHLQCLE | 30) | RVVSVLTVLHQDWLNG | | ISGDSGYTNY | ID NO: | LLIYAASSL |
| | EELKPLEEAL | | KEYKCKVSNKALPAPI | | ADSVKGRFTI | 22) | QSGVPSRFS |
| | NLAPSKNFHL | | EKTISKAKGQPREPQV | | SRDNSKNTLY | | GSGSGTDFT |
| | RPRDLISDIN | | YTLPPSREEMTKNQVS | | LQMNSLRAED | | LTISSLQPE |
| | VIVLELKGSE | | LTCLVKGFYPSDIAVE | | TAVYYCARDR | | DFATYYCQQ |
| | TTFMCEYADE | | WESNGQPENNYKTTPP | | PYYYYMDVWG | | YKSYPVTFG |
| | TATIVEFINR | | VLDSDGSFFLYSKLTV | | KGTTVTVSS | | QGTKVEIK |
| | WITFSQSIIS | | DKSRWQQGNVFSCSVM | | (SEQ ID | | (SEQ ID |
| | TLT (SEQ | | HEALHNHYTQKSLSLS | | NO: 591) | | NO: 592) |
| | ID NO: 41) | | PG (SEQ ID NO: | | | | |
| | | | 21) | | | | |
| MIAB202 | APTSSSTKKT | GGGGSG | DKTHTCPPCPAPEAAG | GGGGS | EVQLLESGGG | GGGGSG | DIQMTQSPS |
| | QLQLEHLLLD | GGGSGG | APSVFLFPPKPKDTLM | (SEQ ID | LVQPGGSLRL | GGGSGG | SLSASVGDR |
| | LQMILNGINN | GGSGGG | ISRTPEVTCVVVDVSH | NO: 23) | SCAASGFTFS | GGSGGG | VTITCRASQ |
| | YKNPKLTRML | GS | EDPEVKFNWYVDGVEV | | DFWMHWVRQA | GS | SVSRSLAWY |
| | TFKFYMPKKA | (SEQ | HNAKTKPREEQYNSTY | | PGKGLEWISY | (SEQ | QQKPGKAPK |
| | TELKHLQCLE | ID NO: | RVVSVLTVLHQDWLNG | | ISGDSGYTNY | ID NO: | LLIYAASSL |
| | EELKPLEEAL | 22) | KEYKCKVSNKALPAPI | | ADSVKGRFTI | 22) | QSGVPSRFS |
| | NLAPSKNFHL | | EKTISKAKGQPREPQV | | SRDNSKNTLY | | GSGSGTDFT |
| | RPRDLISDIN | | YTLPPSREEMTKNQVS | | LQMNSLRAED | | LTISSLQPE |
| | VIVLELKGSE | | LTCLVKGFYPSDIAVE | | TAVYYCARDR | | DFATYYCQQ |
| | TTFMCEYADE | | WESNGQPENNYKTTPP | | PYYYYMDVWG | | YKSYPVTFG |
| | TATIVEFINR | | VLDSDGSFFLYSKLTV | | KGTTVTVSS | | QGTKVEIK |
| | WITFSQSIIS | | DKSRWQQGNVFSCSVM | | (SEQ ID | | (SEQ ID |
| | TLT (SEQ | | HEALHNHYTQKSLSLS | | NO: 591) | | NO: 592) |
| | ID NO: 41) | | PG (SEQ ID NO: | | | | |
| | | | 21) | | | | |
| MIAB203 | APTSSSTKKT | GGGGSG | DKTHTCPPCPAPEAAG | GGGGSGG | EVQLLESGGG | GGGGSG | DIQMTQSPS |
| | QLQLEHLLLD | GGGSGG | APSVFLFPPKPKDTLM | GGS | LVQPGGSLRL | GGGSGG | SLSASVGDR |
| | LQMILNGINN | GGSGGG | ISRTPEVTCVVVDVSH | (SEQ ID | SCAASGFTFS | GGSGGG | VTITCRASQ |
| | YKNPKLTRML | GS | EDPEVKFNWYVDGVEV | NO: | DFWMHWVRQA | GS | SVSRSLAWY |
| | TFKFYMPKKA | (SEQ | HNAKTKPREEQYNSTY | 619) | PGKGLEWISY | (SEQ | QQKPGKAPK |
| | TELKHLQCLE | ID NO: | RVVSVLTVLHQDWLNG | | ISGDSGYTNY | ID NO: | LLIYAASSL |
| | EELKPLEEAL | 22) | KEYKCKVSNKALPAPI | | ADSVKGRFTI | 22) | QSGVPSRFS |
| | NLAPSKNFHL | | EKTISKAKGQPREPQV | | SRDNSKNTLY | | GSGSGTDFT |
| | RPRDLISDIN | | YTLPPSREEMTKNQVS | | LQMNSLRAED | | LTISSLQPE |
| | VIVLELKGSE | | LTCLVKGFYPSDIAVE | | TAVYYCARDR | | DFATYYCQQ |
| | TTFMCEYADE | | WESNGQPENNYKTTPP | | PYYYYMDVWG | | YKSYPVTFG |
| | TATIVEFINR | | VLDSDGSFFLYSKLTV | | KGTTVTVSS | | QGTKVEIK |
| | WITFSQSIIS | | DKSRWQQGNVFSCSVM | | (SEQ ID | | (SEQ ID |
| | TLT (SEQ | | HEALHNHYTQKSLSLS | | NO: 591) | | NO: 592) |
| | ID NO: 41) | | PG (SEQ ID NO: | | | | |
| | | | 21) | | | | |
| MIAB204 | APTSSSTKKT | GGGGSG | DKTHTCPPCPAPEAAG | GGGGSGG | EVQLLESGGG | GGGGSG | DIQMTQSPS |
| | QLQLEHLLLD | GGGSGG | APSVFLFPPKPKDTLM | GGSGGGG | LVQPGGSLRL | GGGSGG | SLSASVGDR |
| | LQMILNGINN | GGSGGG | ISRTPEVTCVVVDVSH | S (SEQ | SCAASGFTFS | GGSGGG | VTITCRASQ |
| | YKNPKLTRML | GS | EDPEVKFNWYVDGVEV | ID NO: | DFWMHWVRQA | GS | SVSRSLAWY |
| | TFKFYMPKKA | (SEQ | HNAKTKPREEQYNSTY | 30) | PGKGLEWISY | (SEQ | QQKPGKAPK |
| | TELKHLQCLE | ID NO: | RVVSVLTVLHQDWLNG | | ISGDSGYTNY | ID NO: | LLIYAASSL |
| | EELKPLEEAL | 22) | KEYKCKVSNKALPAPI | | ADSVKGRFTI | | QSGVPSRFS |
| | NLAPSKNFHL | | EKTISKAKGQPREPQV | | SRDNSKNTLY | 22) | GSGSGTDFT |
| | RPRDLISDIN | | YTLPPSREEMTKNQVS | | LQMNSLRAED | | LTISSLQPE |
| | VIVLELKGSE | | LTCLVKGFYPSDIAVE | | TAVYYCARDR | | DFATYYCQQ |
| | TTFMCEYADE | | WESNGQPENNYKTTPP | | PYYYYMDVWG | | YKSYPVTFG |
| | TATIVEFINR | | VLDSDGSFFLYSKLTV | | KGTTVTVSS | | QGTKVEIK |
| | WITFSQSIIS | | DKSRWQQGNVFSCSVM | | (SEQ ID | | (SEQ ID |
| | TLT (SEQ | | HEALHNHYTQKSLSLS | | NO: 591) | | NO: 592) |
| | ID NO: 41) | | PG (SEQ ID NO: | | | | |
| | | | 21) | | | | |
| MIAB212 | APTSSSTKKT | GGGGSG | DKTHTCPPCPAPEAAG | GGGGSGG | EVQLLESGGG | GGGGSG | DIQMTQSPS |
| | QLQLEHLLLD | GGGSGG | APSVFLFPPKPKDTLM | GGSGGGG | LVQPGGSLRL | GGGSGG | SLSASVGDR |
| | LQMILNGINN | GGS | ISRTPEVTCVVVDVSH | 00 (SEQ | SCAASGFTFS | GGSGGG | VTITCRASQ |
| | YKNPKLTRML | (SEQ | EDPEVKFNWYVDGVEV | ID NO: | SYWMHWVRQA | GS | SISSSLAWY |
| | TFKFYMPKKA | ID NO: | HNAKTKPREEQYNSTY | 30) | PGKGLEWVSY | (SEQ | QQKPGKAPK |
| | TELKHLQCLE | 30) | RVVSVLTVLHQDWING | | ISGSGGYTNY | ID NO: | LLIYAASSL |
| | EELKPLEEAL | | KEYKCKVSNKALPAPI | | ADSVKGRFTI | 22) | QSGVPSRFS |
| | NLAPSKNFHL | | EKTISKAKGQPREPQV | | SRDNSKNTLY | | GSGSGTDFT |
| | RPRDLISDIN | | YTLPPSREEMTKNQVS | | LQMNSLRAED | | LTISSLQPE |
| | VIVLELKGSE | | LTCLVKGFYPSDIAVE | | TAVYYCARDR | | DFATYYCQQ |
| | TTFMCEYADE | | WESNGQPENNYKTTPP | | PYYYDMDVWG | | YKSYPVTFG |
| | TATIVEFINR | | VLDSDGSFFLYSKLTV | | KGTTVTVSS | | QGTKVEIK |
| | WITFSQSIIS | | DKSRWQQGNVFSCSVM | | (SEQ ID | | (SEQ ID |
| | TLT (SEQ | | HEALHNHYTQKSLSLS | | NO: 1445) | | NO: 1367) |
| | ID NO: 41) | | PG (SEQ ID NO: | | | | |
| | | | 21) | | | | |
| MIAB213 | APTSSSTKKT | GGGGSG | DKTHTCPPCPAPEAAG | GGGGSGG | EVQLLESGGG | GGGGSG | DIQMTQSPS |
| | QLQLEHLLLD | GGGSGG | APSVFLFPPKPKDTLM | GGSGGGG | LVQPGGSLRL | GGGSGG | SLSASVGDR |
| | LQMILNGINN | GGS | ISRTPEVTCVVVDVSH | S (SEQ | SCAASGFTFS | GGSGGG | VTITCRASQ |
| | YKNPKLTRML | (SEQ | EDPEVKFNWYVDGVEV | ID NO: | SYWMHWVRQA | GS | SISSSLAWY |
| | TFKFYMPKKA | ID NO: | HNAKTKPREEQYNSTY | 30) | PGKGLEWVSY | (SEQ | QQKPGKAPK |
| | TELKHLQCLE | 30) | RVVSVLTVLHQDWING | | ISGSGGYTNY | ID NO: | LLIYAASSL |
| | EELKPLEEAL | | KEYKCKVSNKALPAPI | | ADSVKGRFTI | 22) | QSGVPSRFS |
| | NLAPSKNFHL | | EKTISKAKGQPREPQV | | SRDNSKNTLY | | GSGSGTDFT |
| | RPRDLISDIN | | YTLPPSREEMTKNQVS | | LQMNSLRAED | | LTISSLQPE |
| | VIVLELKGSE | | LTCLVKGFYPSDIAVE | | TAVYYCARDR | | DFATYYCQQ |
| | TTFMCEYADE | | WESNGQPENNYKTTPP | | PYYYDIDVWG | | YKSYPVTFG |
| | TATIVEFINR | | VLDSDGSFFLYSKLTV | | KGTTVTVSS | | QGTKVEIK |
| | WITFSQSIIS | | DKSRWQQGNVFSCSVM | | (SEQ ID | | (SEQ ID |
| | TLT (SEQ | | HEALHNHYTQKSLSLS | | NO: 1477) | | NO: 1367) |
| | ID NO: 41) | | PG (SEQ ID NO: | | | | |
| | | | 21) | | | | |
| MIAB214 | APTSSSTKKT | GGGGSG | DKTHTCPPCPAPEAAG | GGGGSGG | EVQLLESGGG | GGGGSG | DIQMTQSPS |
| | QLQLEHLLLD | GGGSGG | APSVFLFPPKPKDTLM | GGSGGGG | LVQPGGSLRL | GGGSGG | SLSASVGDR |
| | LQMILNGINN | GGS | ISRTPEVTCVVVDVSH | S (SEQ | SCAASGFTFS | GGSGGG | VTITCRASQ |
| | YKNPKLTRML | (SEQ | EDPEVKFNWYVDGVEV | ID NO: | SYWMHWVRQA | GS | SISSSLAWY |
| | TFKFYMPKKA | ID NO: | HNAKTKPREEQYNSTY | 30) | PGKGLEWVSY | (SEQ | QQKPGKAPK |
| | TELKHLQCLE | 30) | RVVSVLTVLHQDWLNG | | ISGSGGYTNY | ID NO: | LLIYAASSL |
| | EELKPLEEAL | | KEYKCKVSNKALPAPI | | ADSVKGRFTI | 22) | QSGVPSRFS |
| | NLAPSKNFHL | | EKTISKAKGQPREPQV | | SRDNSKNTLY | | GSGSGTDFT |
| | RPRDLISDIN | | YTLPPSREEMTKNQVS | | LQMNSLRAED | | LTISSLQPE |
| | VIVLELKGSE | | LTCLVKGFYPSDIAVE | | TAVYYCARDR | | DFATYYCQQ |
| | TTFMCEYADE | | WESNGQPENNYKTTPP | | PYYYDLDVWG | | YKSYPVTFG |
| | TATIVEFINR | | VLDSDGSFFLYSKLTV | | KGTTVTVSS | | QGTKVEIK |
| | WITFSQSIIS | | DKSRWQQGNVFSCSVM | | (SEQ ID | | (SEQ ID |
| | TLT (SEQ | | HEALHNHYTQKSLSLS | | NO: 1480) | | NO: 1367) |
| | ID NO: 41) | | PG (SEQ ID NO: | | | | |
| | | | 21) | | | | |
| MIAB215 | APTSSSTKKT | GGGGSG | DKTHTCPPCPAPEAAG | GGGGSGG | EVQLLESGGG | GGGGSG | DIQMTQSPS |
| | QLQLEHLLLD | GGGSGG | APSVFLFPPKPKDTLM | GGSGGGG | LVQPGGSLRL | GGGSGG | SLSASVGDR |
| | LQMILNGINN | GGS | ISRTPEVTCVVVDVSH | S (SEQ | SCAASGFTFS | GGSGGG | VTITCRASQ |
| | YKNPKLTRML | (SEQ | EDPEVKFNWYVDGVEV | ID NO: | SYWMHWVRQA | GS | SISSSLAWY |
| | TFKFYMPKKA | ID NO: | HNAKTKPREEQYNSTY | 30) | PGKCLEWVSY | (SEQ | QQKPGKAPK |
| | TELKHLQCLE | 30) | RVVSVLTVLHQDWLNG | | ISGSGGYTNY | ID NO: | LLIYAASSL |
| | EELKPLEEAL | | KEYKCKVSNKALPAPI | | ADSVKGRFTI | 22) | QSGVPSRFS |
| | NLAPSKNFHL | | EKTISKAKGQPREPQV | | SRDNSKNTLY | | GSGSGTDFT |
| | RPRDLISDIN | | YTLPPSREEMTKNQVS | | LQMNSLRAED | | LTISSLQPE |
| | VIVLELKGSE | | LTCLVKGFYPSDIAVE | | TAVYYCARDR | | DFATYYCQQ |
| | TTFMCEYADE | | WESNGQPENNYKTTPP | | PYYYDMDVWG | | YKSYPVTFG |
| | TATIVEFINR | | VLDSDGSFFLYSKLTV | | KGTTVTVSS | | CGTKVEIK |
| | WITFSQSIIS | | DKSRWQQGNVFSCSVM | | (SEQ ID | | (SEQ ID |
| | TLT (SEQ | | HEALHNHYTQKSLSLS | | NO: 1542) | | NO: 1543) |
| | ID NO: 41) | | PG (SEQ ID NO: | | | | |
| | | | 21) | | | | |
| MIAB216 | APTSSSTKKT | GGGGSG | DKTHTCPPCPAPEAAG | GGGGSGG | EVQLLESGGG | GGGGSG | DIQMTQSPS |
| | QLQLEHLLLD | GGGSGG | APSVFLFPPKPKDTLM | GGSGGGG | LVQPGGSLRL | GGGSGG | SLSASVGDR |
| | LQMILNGINN | GGS | ISRTPEVTCVVVDVSH | S (SEQ | SCAASGFTFS | GGSGGG | VTITCRASQ |
| | YKNPKLTRML | (SEQ | EDPEVKFNWYVDGVEV | ID NO: | SYWMHWVRQA | GS | SISSSLAWY |
| | TFKFYMPKKA | ID NO: | HNAKTKPREEQYNSTY | 30) | PGKCLEWVSY | (SEQ | QQKPGKAPK |
| | TELKHLQCLE | 30) | RVVSVLTVLHQDWLNG | | ISGSGGYTNY | ID NO: | LLIYAASSL |
| | EELKPLEEAL | | KEYKCKVSNKALPAPI | | ADSVKGRFTI | 22) | QSGVPSRFS |
| | NLAPSKNFHL | | EKTISKAKGQPREPQV | | SRDNSKNTLY | | GSGSGTDFT |
| | RPRDLISDIN | | YTLPPSREEMTKNQVS | | LQMNSLRAED | | LTISSLQPE |
| | VIVLELKGSE | | LTCLVKGFYPSDIAVE | | TAVYYCARDR | | DFATYYCQQ |
| | TTFMCEYADE | | WESNGQPENNYKTTPP | | PYYYDIDVWG | | YKSYPVTFG |
| | TATIVEFINR | | VLDSDGSFFLYSKLTV | | KGTTVTVSS | | CGTKVEIK |
| | WITFSQSIIS | | DKSRWQQGNVFSCSVM | | (SEQ ID | | (SEQ ID |
| | TLT (SEQ | | HEALHNHYTQKSLSLS | | NO: 1544) | | NO: 1543) |
| | ID NO: 41) | | PG (SEQ ID NO: | | | | |
| | | | 21) | | | | |
| MIAB217 | APTSSSTKKT | GGGGSG | DKTHTCPPCPAPEAAG | GGGGSGG | EVQLLESGGG | GGGGSG | DIQMTQSPS |
| | QLQLEHLLLD | GGGSGG | APSVFLFPPKPKDTLM | GGSGGGG | LVQPGGSLRL | GGGSGG | SLSASVGDR |
| | LQMILNGINN | GGS | ISRTPEVTCVVVDVSH | S (SEQ | SCAASGFTFS | GGSGGG | VTITCRASQ |
| | YKNPKLTRML | (SEQ | EDPEVKFNWYVDGVEV | ID NO: | SYWMHWVRQA | GS | SISSSLAWY |
| | TFKFYMPKKA | ID NO: | HNAKTKPREEQYNSTY | 30) | PGKCLEWVSY | (SEQ | QQKPGKAPK |
| | TELKHLQCLE | 30) | RVVSVLTVLHQDWING | | ISGSGGYTNY | ID NO: | LLIYAASSL |
| | EELKPLEEAL | | KEYKCKVSNKALPAPI | | ADSVKGRFTI | 22) | QSGVPSRFS |
| | NLAPSKNFHL | | EKTISKAKGQPREPQV | | SRDNSKNTLY | | GSGSGTDFT |
| | RPRDLISDIN | | YTLPPSREEMTKNQVS | | LQMNSLRAED | | LTISSLQPE |
| | VIVLELKGSE | | LTCLVKGFYPSDIAVE | | TAVYYCARDR | | DFATYYCQQ |
| | TTFMCEYADE | | WESNGQPENNYKTTPP | | PYYYDLDVWG | | YKSYPVTFG |
| | TATIVEFINR | | VLDSDGSFFLYSKLTV | | KGTTVTVSS | | CGTKVEIK |
| | WITFSQSIIS | | DKSRWQQGNVFSCSVM | | (SEQ ID | | (SEQ ID |
| | TLT (SEQ | | HEALHNHYTQKSLSLS | | NO: 1545) | | NO: 1543) |
| | ID NO: 41) | | PG (SEQ ID NO: | | | | |
| | | | 21) | | | | |
| MIAB218 | APTSSSTKKT | GGGGSG | DKTHTCPPCPAPEAAG | GGGSEGG | EVQLLESGGG | GGGGSG | DIQMTQSPS |
| | QLQLEHLLLD | GGGSGG | APSVFLFPPKPKDTLM | GSEGGGS | LVQPGGSLRL | GGGSGG | SLSASVGDR |
| | LQMILNGINN | GGS | ISRTPEVTCVVVDVSH | E (SEQ | SCAASGFTFS | GGSGGG | VTITCRASQ |
| | YKNPKLTRML | (SEQ | EDPEVKFNWYVDGVEV | ID NO: | SYWMHWVRQA | GS | SISSSLAWY |
| | TFKFYMPKKA | ID NO: | HNAKTKPREEQYNSTY | 1546) | PGKGLEWVSY | (SEQ | QQKPGKAPK |
| | TELKHLQCLE | 30) | RVVSVLTVLHQDWING | | ISGSGGYTNY | ID NO: | LLIYAASSL |
| | EELKPLEEAL | | KEYKCKVSNKALPAPI | | ADSVKGRFTI | 22) | QSGVPSRFS |
| | NLAPSKNFHL | | EKTISKAKGQPREPQV | | SRDNSKNTLY | | GSGSGTDFT |
| | RPRDLISDIN | | YTLPPSREEMTKNQVS | | LQMNSLRAED | | LTISSLQPE |
| | VIVLELKGSE | | LTCLVKGFYPSDIAVE | | TAVYYCARDR | | DFATYYCQQ |
| | TTFMCEYADE | | WESNGQPENNYKTTPP | | PYYYDMDVWG | | YKSYPVTFG |
| | TATIVEFINR | | VLDSDGSFFLYSKLTV | | KGTTVTVSS | | QGTKVEIK |
| | WITFSQSIIS | | DKSRWQQGNVFSCSVM | | (SEQ ID | | (SEQ ID |
| | TLT (SEQ | | HEALHNHYTQKSLSLS | | NO: 1445) | | NO: 1367) |
| | ID NO: 41) | | PG (SEQ ID NO: | | | | |
| | | | 21) | | | | |
| MIAB219 | APTSSSTKKT | GGGGSG | DKTHTCPPCPAPEAAG | GGGSEGG | EVQLLESGGG | GGGGSG | DIQMTQSPS |
| | QLQLEHLLLD | GGGSGG | APSVFLFPPKPKDTLM | GSEGGGS | LVQPGGSLRL | GGGSGG | SLSASVGDR |
| | LQMILNGINN | GGS | ISRTPEVTCVVVDVSH | E (SEQ | SCAASGFTFS | GGSGGG | VTITCRASQ |
| | YKNPKLTRML | (SEQ | EDPEVKFNWYVDGVEV | ID NO: | SYWMHWVRQA | GS | SISSSLAWY |
| | TFKFYMPKKA | ID NO: | HNAKTKPREEQYNSTY | 1546) | PGKGLEWVSY | (SEQ | QQKPGKAPK |
| | TELKHLQCLE | 30) | RVVSVLTVLHQDWLNG | | ISGSGGYTNY | ID NO: | LLIYAASSL |
| | EELKPLEEAL | | KEYKCKVSNKALPAPI | | ADSVKGRFTI | 22) | QSGVPSRFS |
| | NLAPSKNFHL | | EKTISKAKGQPREPQV | | SRDNSKNTLY | | GSGSGTDFT |
| | RPRDLISDIN | | YTLPPSREEMTKNQVS | | LQMNSLRAED | | LTISSLQPE |
| | VIVLELKGSE | | LTCLVKGFYPSDIAVE | | TAVYYCARDR | | DFATYYCQQ |
| | TTFMCEYADE | | WESNGQPENNYKTTPP | | PYYYDIDVWG | | YKSYPVTFG |
| | TATIVEFINR | | VLDSDGSFFLYSKLTV | | KGTTVTVSS | | QGTKVEIK |
| | WITFSQSIIS | | DKSRWQQGNVFSCSVM | | (SEQ ID | | (SEQ ID |
| | TLT (SEQ | | HEALHNHYTQKSLSLS | | NO: 1477) | | NO: 1367) |
| | ID NO: 41) | | PG (SEQ ID NO: | | | | |
| | | | 21) | | | | |
| MIAB220 | APTSSSTKKT | GGGGSG | DKTHTCPPCPAPEAAG | GGGSEGG | EVQLLESGGG | GGGGSG | DIQMTQSPS |
| | QLQLEHLLLD | GGGSGG | APSVFLFPPKPKDTLM | GSEGGGS | LVQPGGSLRL | GGGSGG | SLSASVGDR |
| | LQMILNGINN | GGS | ISRTPEVTCVVVDVSH | E (SEQ | SCAASGFTFS | GGSGGG | VTITCRASQ |
| | YKNPKLTRML | (SEQ | EDPEVKFNWYVDGVEV | ID NO: | SYWMHWVRQA | GS | SISSSLAWY |
| | TFKFYMPKKA | ID NO: | HNAKTKPREEQYNSTY | 1546) | PGKGLEWVSY | (SEQ | QQKPGKAPK |
| | TELKHLQCLE | 30) | RVVSVLTVLHQDWLNG | | ISGSGGYTNY | ID NO: | LLIYAASSL |
| | EELKPLEEAL | | KEYKCKVSNKALPAPI | | ADSVKGRFTI | 22) | QSGVPSRFS |
| | NLAPSKNFHL | | EKTISKAKGQPREPQV | | SRDNSKNTLY | | GSGSGTDFT |
| | RPRDLISDIN | | YTLPPSREEMTKNQVS | | LQMNSLRAED | | LTISSLQPE |
| | VIVLELKGSE | | LTCLVKGFYPSDIAVE | | TAVYYCARDR | | DFATYYCQQ |
| | TTFMCEYADE | | WESNGQPENNYKTTPP | | PYYYDLDVWG | | YKSYPVTFG |
| | TATIVEFINR | | VLDSDGSFFLYSKLTV | | KGTTVTVSS | | QGTKVEIK |
| | WITFSQSIIS | | DKSRWQQGNVFSCSVM | | (SEQ ID | | (SEQ ID |
| | TLT (SEQ | | HEALHNHYTQKSLSLS | | NO: 1480) | | NO: 1367) |
| | ID NO: 41) | | PG (SEQ ID NO: | | | | |
| | | | 21) | | | | |
| MIAB221 | APTSSSTKKT | GGGGSG | DKTHTCPPCPAPEAAG | GGGSEGG | EVQLLESGGG | GGGGSG | DIQMTQSPS |
| | QLQLEHLLLD | GGGSGG | APSVFLFPPKPKDTLM | GSEGGGS | LVQPGGSLRL | GGGSGG | SLSASVGDR |
| | LQMILNGINN | GGS | ISRTPEVTCVVVDVSH | E (SEQ | SCAASGFTFS | GGSGGG | VTITCRASQ |
| | YKNPKLTRML | (SEQ | EDPEVKENWYVDGVEV | ID NO: | SYWMHWVRQA | GS | SISSSLAWY |
| | TFKFYMPKKA | ID NO: | HNAKTKPREEQYNSTY | 1546) | PGKCLEWVSY | (SEQ | QQKPGKAPK |
| | TELKHLQCLE | 30) | RVVSVLTVLHQDWLNG | | ISGSGGYTNY | ID NO: | LLIYAASSL |
| | EELKPLEEAL | | KEYKCKVSNKALPAPI | | ADSVKGRFTI | 22) | QSGVPSRFS |
| | NLAPSKNFHL | | EKTISKAKGQPREPQV | | SRDNSKNTLY | | GSGSGTDFT |
| | RPRDLISDIN | | YTLPPSREEMTKNQVS | | LQMNSLRAED | | LTISSLQPE |
| | VIVLELKGSE | | LTCLVKGFYPSDIAVE | | TAVYYCARDR | | DFATYYCQQ |
| | TTFMCEYADE | | WESNGQPENNYKTTPP | | PYYYDMDVWG | | YKSYPVTFG |
| | TATIVEFINR | | VLDSDGSFFLYSKLTV | | KGTTVTVSS | | CGTKVEIK |
| | WITFSQSIIS | | DKSRWQQGNVFSCSVM | | (SEQ ID | | (SEQ ID |
| | TLT (SEQ | | HEALHNHYTQKSLSLS | | NO: 1542) | | NO: 1543) |
| | ID NO: 41) | | PG (SEQ ID NO: | | | | |
| | | | 21) | | | | |
| MIAB222 | APTSSSTKKT | GGGGSG | DKTHTCPPCPAPEAAG | GGGSEGG | EVQLLESGGG | GGGGSG | DIQMTQSPS |
| | QLQLEHLLLD | GGGSGG | APSVFLFPPKPKDTLM | GSEGGGS | LVQPGGSLRL | GGGSGG | SLSASVGDR |
| | LQMILNGINN | GGS | ISRTPEVTCVVVDVSH | E (SEQ | SCAASGFTFS | GGSGGG | VTITCRASQ |
| | YKNPKLTRML | (SEQ | EDPEVKFNWYVDGVEV | ID NO: | SYWMHWVRQA | GS | SISSSLAWY |
| | TFKFYMPKKA | ID NO: | HNAKTKPREEQYNSTY | 1546) | PGKCLEWVSY | (SEQ | QQKPGKAPK |
| | TELKHLQCLE | 30) | RVVSVLTVLHQDWING | | ISGSGGYTNY | ID NO: | LLIYAASSL |
| | EELKPLEEAL | | KEYKCKVSNKALPAPI | | ADSVKGRFTI | 22) | QSGVPSRFS |
| | NLAPSKNFHL | | EKTISKAKGQPREPQV | | SRDNSKNTLY | | GSGSGTDFT |
| | RPRDLISDIN | | YTLPPSREEMTKNQVS | | LQMNSLRAED | | LTISSLQPE |
| | VIVLELKGSE | | LTCLVKGFYPSDIAVE | | TAVYYCARDR | | DFATYYCQQ |
| | TTFMCEYADE | | WESNGQPENNYKTTPP | | PYYYDIDVWG | | YKSYPVTFG |
| | TATIVEFINR | | VLDSDGSFFLYSKLTV | | KGTTVTVSS | | CGTKVEIK |
| | WITFSQSIIS | | DKSRWQQGNVFSCSVM | | (SEQ ID | | (SEQ ID |
| | TLT (SEQ | | HEALHNHYTQKSLSLS | | NO: 1544) | | NO: 1543) |
| | ID NO: 41) | | PG (SEQ ID NO: | | | | |
| | | | 21) | | | | |
| MIAB223 | APTSSSTKKT | GGGGSG | DKTHTCPPCPAPEAAG | GGGSEGG | EVQLLESGGG | GGGGSG | DIQMTQSPS |
| | QLQLEHLLLD | GGGSGG | APSVFLFPPKPKDTLM | GSEGGGS | LVQPGGSLRL | GGGSGG | SLSASVGDR |
| | LQMILNGINN | GGS | ISRTPEVTCVVVDVSH | E (SEQ | SCAASGFTFS | GGSGGG | VTITCRASQ |
| | YKNPKLTRML | (SEQ | EDPEVKFNWYVDGVEV | ID NO: | SYWMHWVRQA | GS | SISSSLAWY |
| | TFKFYMPKKA | ID NO: | HNAKTKPREEQYNSTY | 1546) | PGKCLEWVSY | (SEQ | QQKPGKAPK |
| | TELKHLQCLE | 30) | RVVSVLTVLHQDWLNG | | ISGSGGYTNY | ID NO: | LLIYAASSL |
| | EELKPLEEAL | | KEYKCKVSNKALPAPI | | ADSVKGRFTI | 22) | QSGVPSRFS |
| | NLAPSKNFHL | | EKTISKAKGQPREPQV | | SRDNSKNTLY | | GSGSGTDFT |
| | RPRDLISDIN | | YTLPPSREEMTKNQVS | | LQMNSLRAED | | LTISSLQPE |
| | VIVLELKGSE | | LTCLVKGFYPSDIAVE | | TAVYYCARDR | | DFATYYCQQ |
| | TTFMCEYADE | | WESNGQPENNYKTTPP | | PYYYDLDVWG | | YKSYPVTFG |
| | TATIVEFINR | | VLDSDGSFFLYSKLTV | | KGTTVTVSS | | CGTKVEIK |
| | WITFSQSIIS | | DKSRWQQGNVFSCSVM | | (SEQ ID | | (SEQ ID |
| | TLT (SEQ | | HEALHNHYTQKSLSLS | | NO: 1545) | | NO: 1543) |
| | ID NO: 41) | | PG (SEQ ID NO: | | | | |
| | | | 21) | | | | |
| MIAB224 | APTSSSTKKT | GGGGSG | DKTHTCPPCPAPEAAG | GGGGSGG | EVQLLESGGG | GGGGSG | DIQMTQSPS |
| | QLQLEHLLLD | GGGSGG | APSVFLFPPKPKDTLM | GGSGGGG | LVQPGGSLRL | GGGSGG | SLSASVGDR |
| | LQMILNGINN | GGSGGG | ISRTPEVTCVVVDVSH | S (SEQ | SCAASGFTFS | GGSGGG | VTITCRASQ |
| | YKNPKLTRML | GS | EDPEVKFNWYVDGVEV | ID NO: | SYWMHWVRQA | GS | SISSSLAWY |
| | TFKFYMPKKA | (SEQ | HNAKTKPREEQYNSTY | 30) | PGKGLEWVSY | (SEQ | QQKPGKAPK |
| | TELKHLQCLE | ID NO: | RVVSVLTVLHQDWLNG | | ISGSGGYTNY | ID NO: | LLIYAASSL |
| | EELKPLEEAL | 22) | KEYKCKVSNKALPAPI | | ADSVKGRFTI | 22) | QSGVPSRFS |
| | NLAPSKNFHL | | EKTISKAKGQPREPQV | | SRDNSKNTLY | | GSGSGTDFT |
| | RPRDLISDIN | | YTLPPSREEMTKNQVS | | LQMNSLRAED | | LTISSLQPE |
| | VIVLELKGSE | | LTCLVKGFYPSDIAVE | | TAVYYCARDR | | DFATYYCQQ |
| | TTFMCEYADE | | WESNGQPENNYKTTPP | | PYYYDMDVWG | | YKSYPVTFG |
| | TATIVEFINR | | VLDSDGSFFLYSKLTV | | KGTTVTVSS | | QGTKVEIK |
| | WITFSQSIIS | | DKSRWQQGNVFSCSVM | | (SEQ ID | | (SEQ ID |
| | TLT (SEQ | | HEALHNHYTQKSLSLS | | NO: 1445) | | NO: 1367) |
| | ID NO: 41) | | PG (SEQ ID NO: | | | | |
| | | | 21) | | | | |
| MIAB225 | APTSSSTKKT | GGGGSG | DKTHTCPPCPAPEAAG | GGGGSGG | EVQLLESGGG | GGGGSG | DIQMTQSPS |
| | QLQLEHLLLD | GGGSGG | APSVFLFPPKPKDTLM | GGSGGGG | LVQPGGSLRL | GGGSGG | SLSASVGDR |
| | LQMILNGINN | GGSGGG | ISRTPEVTCVVVDVSH | S (SEQ | SCAASGFTFS | GGSGGG | VTITCRASQ |
| | YKNPKLTRML | GS | EDPEVKFNWYVDGVEV | ID NO: | SYWMHWVRQA | GS | SISSSLAWY |
| | TFKFYMPKKA | (SEQ | HNAKTKPREEQYNSTY | 30) | PGKGLEWVSY | (SEQ | QQKPGKAPK |
| | TELKHLQCLE | ID NO: | RVVSVLTVLHQDWLNG | | ISGSGGYTNY | ID NO: | LLIYAASSL |
| | EELKPLEEAL | 22) | KEYKCKVSNKALPAPI | | ADSVKGRFTI | 22) | QSGVPSRFS |
| | NLAPSKNFHL | | EKTISKAKGQPREPQV | | SRDNSKNTLY | | GSGSGTDFT |
| | RPRDLISDIN | | YTLPPSREEMTKNQVS | | LQMNSLRAED | | LTISSLQPE |
| | VIVLELKGSE | | LTCLVKGFYPSDIAVE | | TAVYYCARDR | | DFATYYCQQ |
| | TTFMCEYADE | | WESNGQPENNYKTTPP | | PYYYDIDVWG | | YKSYPVTFG |
| | TATIVEFINR | | VLDSDGSFFLYSKLTV | | KGTTVTVSS | | QGTKVEIK |
| | WITFSQSIIS | | DKSRWQQGNVFSCSVM | | (SEQ ID | | (SEQ ID |
| | TLT (SEQ | | HEALHNHYTQKSLSLS | | NO: 1477) | | NO: 1367) |
| | ID NO: 41) | | PG (SEQ ID NO: | | | | |
| | | | 21) | | | | |
| MIAB226 | APTSSSTKKT | GGGGSG | DKTHTCPPCPAPEAAG | GGGGSGG | EVQLLESGGG | GGGGSG | DIQMTQSPS |
| | QLQLEHLLLD | GGGSGG | APSVFLFPPKPKDTLM | GGSGGGG | LVQPGGSLRL | GGGSGG | SLSASVGDR |
| | LQMILNGINN | GGSGGG | ISRTPEVTCVVVDVSH | S (SEQ | SCAASGFTFS | GGSGGG | VTITCRASQ |
| | YKNPKLTRML | GS | EDPEVKFNWYVDGVEV | ID NO: | SYWMHWVRQA | GS | SISSSLAWY |
| | TFKFYMPKKA | (SEQ | HNAKTKPREEQYNSTY | 30) | PGKGLEWVSY | (SEQ | QQKPGKAPK |
| | TELKHLQCLE | ID NO: | RVVSVLTVLHQDWLNG | | ISGSGGYTNY | ID NO: | LLIYAASSL |
| | EELKPLEEAL | 22) | KEYKCKVSNKALPAPI | | ADSVKGRFTI | 22) | QSGVPSRFS |
| | NLAPSKNFHL | | EKTISKAKGQPREPQV | | SRDNSKNTLY | | GSGSGTDFT |
| | RPRDLISDIN | | YTLPPSREEMTKNQVS | | LQMNSLRAED | | LTISSLQPE |
| | VIVLELKGSE | | LTCLVKGFYPSDIAVE | | TAVYYCARDR | | DFATYYCQQ |
| | TTFMCEYADE | | WESNGQPENNYKTTPP | | PYYYDLDVWG | | YKSYPVTFG |
| | TATIVEFINR | | VLDSDGSFFLYSKLTV | | KGTTVTVSS | | QGTKVEIK |
| | WITFSQSIIS | | DKSRWQQGNVFSCSVM | | (SEQ ID | | (SEQ ID |
| | TLT (SEQ | | HEALHNHYTQKSLSLS | | NO: 1480) | | NO: 1367) |
| | ID NO: 41) | | PG (SEQ ID NO: | | | | |
| | | | 21) | | | | |
| MIAB227 | APTSSSTKKT | GGGGSG | DKTHTCPPCPAPEAAG | GGGGSGG | EVQLLESGGG | GGGGSG | DIQMTQSPS |
| | QLQLEHLLLD | GGGSGG | APSVFLFPPKPKDTLM | GGSGGGG | LVQPGGSLRL | GGGSGG | SLSASVGDR |
| | LQMILNGINN | GGSGGG | ISRTPEVTCVVVDVSH | S (SEQ | SCAASGFTFS | GGSGGG | VTITCRASQ |
| | YKNPKLTRML | GS | EDPEVKFNWYVDGVEV | ID NO: | SYWMHWVRQA | GS | SISSSLAWY |
| | TFKFYMPKKA | (SEQ | HNAKTKPREEQYNSTY | 30) | PGKCLEWVSY | (SEQ | QQKPGKAPK |
| | TELKHLQCLE | ID NO: | RVVSVLTVLHQDWLNG | | ISGSGGYTNY | ID NO: | LLIYAASSL |
| | EELKPLEEAL | 22) | KEYKCKVSNKALPAPI | | ADSVKGRFTI | | QSGVPSRFS |
| | NLAPSKNFHL | | EKTISKAKGQPREPQV | | SRDNSKNTLY | | GSGSGTDFT |
| | RPRDLISDIN | | YTLPPSREEMTKNQVS | | LQMNSLRAED | | LTISSLQPE |
| | VIVLELKGSE | | LTCLVKGFYPSDIAVE | | TAVYYCARDR | | DFATYYCQQ |
| | TTFMCEYADE | | WESNGQPENNYKTTPP | | PYYYDMDVWG | 22) | YKSYPVTFG |
| | TATIVEFINR | | VLDSDGSFFLYSKLTV | | KGTTVTVSS | | CGTKVEIK |
| | WITFSQSIIS | | DKSRWQQGNVFSCSVM | | (SEQ ID | | (SEQ ID |
| | TLT (SEQ | | HEALHNHYTQKSLSLS | | NO: 1542) | | NO: 1543) |
| | ID NO: 41) | | PG (SEQ ID NO: | | | | |
| | | | 21) | | | | |
| MIAB228 | APTSSSTKKT | GGGGSG | DKTHTCPPCPAPEAAG | GGGGSGG | EVQLLESGGG | GGGGSG | DIQMTQSPS |
| | QLQLEHLLLD | GGGSGG | APSVFLFPPKPKDTLM | GGSGGGG | LVQPGGSLRL | GGGSGG | SLSASVGDR |
| | LQMILNGINN | GGSGGG | ISRTPEVTCVVVDVSH | S (SEQ | SCAASGFTFS | GGSGGG | VTITCRASQ |
| | YKNPKLTRML | GS | EDPEVKFNWYVDGVEV | ID NO: | SYWMHWVRQA | GS | SISSSLAWY |
| | TFKFYMPKKA | (SEQ | HNAKTKPREEQYNSTY | 30) | PGKCLEWVSY | (SEQ | QQKPGKAPK |
| | TELKHLQCLE | ID NO: | RVVSVLTVLHQDWLNG | | ISGSGGYTNY | ID NO: | LLIYAASSL |
| | EELKPLEEAL | 22) | KEYKCKVSNKALPAPI | | ADSVKGRFTI | 22) | QSGVPSRFS |
| | NLAPSKNFHL | | EKTISKAKGQPREPQV | | SRDNSKNTLY | | GSGSGTDFT |
| | RPRDLISDIN | | YTLPPSREEMTKNQVS | | LQMNSLRAED | | LTISSLQPE |
| | VIVLELKGSE | | LTCLVKGFYPSDIAVE | | TAVYYCARDR | | DFATYYCQQ |
| | TTFMCEYADE | | WESNGQPENNYKTTPP | | PYYYDIDVWG | | YKSYPVTFG |
| | TATIVEFINR | | VLDSDGSFFLYSKLTV | | KGTTVTVSS | | CGTKVEIK |
| | WITFSQSIIS | | DKSRWQQGNVFSCSVM | | (SEQ ID | | (SEQ ID |
| | TLT (SEQ | | HEALHNHYTQKSLSLS | | NO: 1544) | | NO: 1543) |
| | ID NO: 41) | | PG (SEQ ID NO: | | | | |
| | | | 21) | | | | |
| MIAB229 | APTSSSTKKT | GGGGSG | DKTHTCPPCPAPEAAG | GGGGSGG | EVQLLESGGG | GGGGSG | DIQMTQSPS |
| | QLQLEHLLLD | GGGSGG | APSVFLFPPKPKDTLM | GGSGGGG | LVQPGGSLRL | GGGSGG | SLSASVGDR |
| | LQMILNGINN | GGSGGG | ISRTPEVTCVVVDVSH | S (SEQ | SCAASGFTFS | GGSGGG | VTITCRASQ |
| | YKNPKLTRML | GS | EDPEVKFNWYVDGVEV | ID NO: | SYWMHWVRQA | GS | SISSSLAWY |
| | TFKFYMPKKA | (SEQ | HNAKTKPREEQYNSTY | 30) | PGKCLEWVSY | (SEQ | QQKPGKAPK |
| | TELKHLQCLE | ID NO: | RVVSVLTVLHQDWLNG | | ISGSGGYTNY | ID NO: | LLIYAASSL |
| | EELKPLEEAL | 22) | KEYKCKVSNKALPAPI | | ADSVKGRFTI | 22) | QSGVPSRFS |
| | NLAPSKNFHL | | EKTISKAKGQPREPQV | | SRDNSKNTLY | | GSGSGTDFT |
| | RPRDLISDIN | | YTLPPSREEMTKNQVS | | LQMNSLRAED | | LTISSLQPE |
| | VIVLELKGSE | | LTCLVKGFYPSDIAVE | | TAVYYCARDR | | DFATYYCQQ |
| | TTFMCEYADE | | WESNGQPENNYKTTPP | | PYYYDLDVWG | | YKSYPVTFG |
| | TATIVEFINR | | VLDSDGSFFLYSKLTV | | KGTTVTVSS | | CGTKVEIK |
| | WITFSQSIIS | | DKSRWQQGNVFSCSVM | | (SEQ ID | | (SEQ ID |
| | TLT (SEQ | | HEALHNHYTQKSLSLS | | NO: 1545) | | NO: 1543) |
| | ID NO: 41) | | PG (SEQ ID NO: | | | | |
| | | | 21) | | | | |
| MIAB230 | APTSSSTKKT | GGGGSG | DKTHTCPPCPAPEAAG | GGGSEGG | EVQLLESGGG | GGGGSG | DIQMTQSPS |
| | QLQLEHLLLD | GGGSGG | APSVFLFPPKPKDTLM | GSEGGGS | LVQPGGSLRL | GGGSGG | SLSASVGDR |
| | LQMILNGINN | GGSGGG | ISRTPEVTCVVVDVSH | E (SEQ | SCAASGFTFS | GGSGGG | VTITCRASQ |
| | YKNPKLTRML | GS | EDPEVKFNWYVDGVEV | ID NO: | SYWMHWVRQA | GS | SISSSLAWY |
| | TFKFYMPKKA | (SEQ | HNAKTKPREEQYNSTY | 1546) | PGKGLEWVSY | (SEQ | QQKPGKAPK |
| | TELKHLQCLE | ID NO: | RVVSVLTVLHQDWING | | ISGSGGYTNY | ID NO: | LLIYAASSL |
| | EELKPLEEAL | 22) | KEYKCKVSNKALPAPI | | ADSVKGRFTI | 22) | QSGVPSRFS |
| | NLAPSKNFHL | | EKTISKAKGQPREPQV | | SRDNSKNTLY | | GSGSGTDFT |
| | RPRDLISDIN | | YTLPPSREEMTKNQVS | | LQMNSLRAED | | LTISSLQPE |
| | VIVLELKGSE | | LTCLVKGFYPSDIAVE | | TAVYYCARDR | | DFATYYCQQ |
| | TTFMCEYADE | | WESNGQPENNYKTTPP | | PYYYDMDVWG | | YKSYPVTFG |
| | TATIVEFINR | | VLDSDGSFFLYSKLTV | | KGTTVTVSS | | QGTKVEIK |
| | WITFSQSIIS | | DKSRWQQGNVFSCSVM | | (SEQ ID | | (SEQ ID |
| | TLT (SEQ | | HEALHNHYTQKSLSLS | | NO: 1445) | | NO: 1367) |
| | ID NO: 41) | | PG (SEQ ID NO: | | | | |
| | | | 21) | | | | |
| MIAB231 | APTSSSTKKT | GGGGSG | DKTHTCPPCPAPEAAG | GGGSEGG | EVQLLESGGG | GGGGSG | DIQMTQSPS |
| | QLQLEHLLLD | GGGSGG | APSVFLFPPKPKDTLM | GSEGGGS | LVQPGGSLRL | GGGSGG | SLSASVGDR |
| | LQMILNGINN | GGSGGG | ISRTPEVTCVVVDVSH | E (SEQ | SCAASGFTFS | GGSGGG | VTITCRASQ |
| | YKNPKLTRML | GS | EDPEVKFNWYVDGVEV | ID NO: | SYWMHWVRQA | GS | SISSSLAWY |
| | TFKFYMPKKA | (SEQ | HNAKTKPREEQYNSTY | 1546) | PGKGLEWVSY | (SEQ | QQKPGKAPK |
| | TELKHLQCLE | ID NO: | RVVSVLTVLHQDWLNG | | ISGSGGYTNY | ID NO: | LLIYAASSL |
| | EELKPLEEAL | 22) | KEYKCKVSNKALPAPI | | ADSVKGRFTI | 22) | QSGVPSRFS |
| | NLAPSKNFHL | | EKTISKAKGQPREPQV | | SRDNSKNTLY | | GSGSGTDFT |
| | RPRDLISDIN | | YTLPPSREEMTKNQVS | | LQMNSLRAED | | LTISSLQPE |
| | VIVLELKGSE | | LTCLVKGFYPSDIAVE | | TAVYYCARDR | | DFATYYCQQ |
| | TTFMCEYADE | | WESNGQPENNYKTTPP | | PYYYDIDVWG | | YKSYPVTFG |
| | TATIVEFINR | | VLDSDGSFFLYSKLTV | | KGTTVTVSS | | QGTKVEIK |
| | WITFSQSIIS | | DKSRWQQGNVFSCSVM | | (SEQ ID | | (SEQ ID |
| | TLT (SEQ | | HEALHNHYTQKSLSLS | | NO: 1477) | | NO: 1367) |
| | ID NO: 41) | | PG (SEQ ID NO: | | | | |
| | | | 21) | | | | |
| MIAB232 | APTSSSTKKT | GGGGSG | DKTHTCPPCPAPEAAG | GGGSEGG | EVQLLESGGG | GGGGSG | DIQMTQSPS |
| | QLQLEHLLLD | GGGSGG | APSVFLFPPKPKDTLM | GSEGGGS | LVQPGGSLRL | GGGSGG | SLSASVGDR |
| | LQMILNGINN | GGSGGG | ISRTPEVTCVVVDVSH | E (SEQ | SCAASGFTFS | GGSGGG | VTITCRASQ |
| | YKNPKLTRML | GS | EDPEVKFNWYVDGVEV | ID NO: | SYWMHWVRQA | GS | SISSSLAWY |
| | TFKFYMPKKA | (SEQ | HNAKTKPREEQYNSTY | 1546) | PGKGLEWVSY | (SEQ | QQKPGKAPK |
| | TELKHLQCLE | ID NO: | RVVSVLTVLHQDWLNG | | ISGSGGYTNY | ID NO: | LLIYAASSL |
| | EELKPLEEAL | 22) | KEYKCKVSNKALPAPI | | ADSVKGRFTI | 22) | QSGVPSRFS |
| | NLAPSKNFHL | | EKTISKAKGQPREPQV | | SRDNSKNTLY | | GSGSGTDFT |
| | RPRDLISDIN | | YTLPPSREEMTKNQVS | | LQMNSLRAED | | LTISSLQPE |
| | VIVLELKGSE | | LTCLVKGFYPSDIAVE | | TAVYYCARDR | | DFATYYCQQ |
| | TTFMCEYADE | | WESNGQPENNYKTTPP | | PYYYDLDVWG | | YKSYPVTFG |
| | TATIVEFINR | | VLDSDGSFFLYSKLTV | | KGTTVTVSS | | QGTKVEIK |
| | WITFSQSIIS | | DKSRWQQGNVFSCSVM | | (SEQ ID | | (SEQ ID |
| | TLT (SEQ | | HEALHNHYTQKSLSLS | | NO: 1480) | | NO: 1367) |
| | ID NO: 41) | | PG (SEQ ID NO: | | | | |
| | | | 21) | | | | |
| MIAB233 | APTSSSTKKT | GGGGSG | DKTHTCPPCPAPEAAG | GGGSEGG | EVQLLESGGG | GGGGSG | DIQMTQSPS |
| | QLQLEHLLLD | GGGSGG | APSVFLFPPKPKDTLM | GSEGGGS | LVQPGGSLRL | GGGSGG | SLSASVGDR |
| | LQMILNGINN | GGSGGG | ISRTPEVTCVVVDVSH | E (SEQ | SCAASGFTFS | GGSGGG | VTITCRASQ |
| | YKNPKLTRML | GS | EDPEVKFNWYVDGVEV | ID NO: | SYWMHWVRQA | GS | SISSSLAWY |
| | TFKFYMPKKA | (SEQ | HNAKTKPREEQYNSTY | 1546) | PGKCLEWVSY | (SEQ | QQKPGKAPK |
| | TELKHLQCLE | ID NO: | RVVSVLTVLHQDWING | | ISGSGGYTNY | ID NO: | LLIYAASSL |
| | EELKPLEEAL | 22) | KEYKCKVSNKALPAPI | | ADSVKGRFTI | 22) | QSGVPSRFS |
| | NLAPSKNFHL | | EKTISKAKGQPREPQV | | SRDNSKNTLY | | GSGSGTDFT |
| | RPRDLISDIN | | YTLPPSREEMTKNQVS | | LQMNSLRAED | | LTISSLQPE |
| | VIVLELKGSE | | LTCLVKGFYPSDIAVE | | TAVYYCARDR | | DFATYYCQQ |
| | TTFMCEYADE | | WESNGQPENNYKTTPP | | PYYYDMDVWG | | YKSYPVTFG |
| | TATIVEFINR | | VLDSDGSFFLYSKLTV | | KGTTVTVSS | | CGTKVEIK |
| | WITFSQSIIS | | DKSRWQQGNVFSCSVM | | (SEQ ID | | (SEQ ID |
| | TLT (SEQ | | HEALHNHYTQKSLSLS | | NO: 1542) | | NO: 1543) |
| | ID NO: 41) | | PG (SEQ ID NO: | | | | |
| | | | 21) | | | | |
| MIAB234 | APTSSSTKKT | GGGGSG | DKTHTCPPCPAPEAAG | GGGSEGG | EVQLLESGGG | GGGGSG | DIQMTQSPS |
| | QLQLEHLLLD | GGGSGG | APSVFLFPPKPKDTLM | GSEGGGS | LVQPGGSLRL | GGGSGG | SLSASVGDR |
| | LQMILNGINN | GGSGGG | ISRTPEVTCVVVDVSH | E (SEQ | SCAASGFTFS | GGSGGG | VTITCRASQ |
| | YKNPKLTRML | GS | EDPEVKFNWYVDGVEV | ID NO: | SYWMHWVRQA | GS | SISSSLAWY |
| | TFKFYMPKKA | (SEQ | HNAKTKPREEQYNSTY | 1546) | PGKCLEWVSY | (SEQ | QQKPGKAPK |
| | TELKHLQCLE | ID NO: | RVVSVLTVLHQDWING | | ISGSGGYTNY | ID NO: | LLIYAASSL |
| | EELKPLEEAL | 22) | KEYKCKVSNKALPAPI | | ADSVKGRFTI | 22) | QSGVPSRFS |
| | NLAPSKNFHL | | EKTISKAKGQPREPQV | | SRDNSKNTLY | | GSGSGTDFT |
| | RPRDLISDIN | | YTLPPSREEMTKNQVS | | LQMNSLRAED | | LTISSLQPE |
| | VIVLELKGSE | | LTCLVKGFYPSDIAVE | | TAVYYCARDR | | DFATYYCQQ |
| | TTFMCEYADE | | WESNGQPENNYKTTPP | | PYYYDIDVWG | | YKSYPVTFG |
| | TATIVEFINR | | VLDSDGSFFLYSKLTV | | KGTTVTVSS | | CGTKVEIK |
| | WITFSQSIIS | | DKSRWQQGNVFSCSVM | | (SEQ ID | | (SEQ ID |
| | TLT (SEQ | | HEALHNHYTQKSLSLS | | NO: 1544) | | NO: 1543) |
| | ID NO: 41) | | PG (SEQ ID NO: | | | | |
| | | | 21) | | | | |
| MIAB235 | APTSSSTKKT | GGGGSG | DKTHTCPPCPAPEAAG | GGGSEGG | EVQLLESGGG | GGGGSG | DIQMTQSPS |
| | QLQLEHLLLD | GGGSGG | APSVFLFPPKPKDTLM | GSEGGGS | LVQPGGSLRL | GGGSGG | SLSASVGDR |
| | LQMILNGINN | GGSGGG | ISRTPEVTCVVVDVSH | E (SEQ | SCAASGFTFS | GGSGGG | VTITCRASQ |
| | YKNPKLTRML | GS | EDPEVKFNWYVDGVEV | ID NO: | SYWMHWVRQA | GS | SISSSLAWY |
| | TFKFYMPKKA | (SEQ | HNAKTKPREEQYNSTY | 1546) | PGKCLEWVSY | (SEQ | QQKPGKAPK |
| | TELKHLQCLE | ID NO: | RVVSVLTVLHQDWLNG | | ISGSGGYTNY | ID NO: | LLIYAASSL |
| | EELKPLEEAL | 22) | KEYKCKVSNKALPAPI | | ADSVKGRFTI | 22) | QSGVPSRFS |
| | NLAPSKNFHL | | EKTISKAKGQPREPQV | | SRDNSKNTLY | | GSGSGTDFT |
| | RPRDLISDIN | | YTLPPSREEMTKNQVS | | LQMNSLRAED | | LTISSLQPE |
| | VIVLELKGSE | | LTCLVKGFYPSDIAVE | | TAVYYCARDR | | DFATYYCQQ |
| | TTFMCEYADE | | WESNGQPENNYKTTPP | | PYYYDLDVWG | | YKSYPVTFG |
| | TATIVEFINR | | VLDSDGSFFLYSKLTV | | KGTTVTVSS | | CGTKVEIK |
| | WITFSQSIIS | | DKSRWQQGNVFSCSVM | | (SEQ ID | | (SEQ ID |
| | TLT (SEQ | | HEALHNHYTQKSLSLS | | NO: 1545) | | NO: 1543) |
| | ID NO: 41) | | PG (SEQ ID NO: | | | | |
| | | | 21) | | | | |

[0501] In some embodiments, the therapeutic comprises one or more sequences, or a combination thereof, selected from Table 11.

[0502] In some embodiments, the polypeptide is referred to as an antibody or antigen binding protein.

[0503] In some embodiments, as provided for herein, the MAdCAM antibody, or binding fragment thereof, is linked directly or indirectly to a PD-1 antibody or binding fragment thereof.

[0504] In some embodiments, as provided for herein, the MAdCAM antibody, or binding fragment thereof, is linked directly or indirectly to a IL-2 mutein or binding fragment thereof. The IL-2 mutein can be any mutein as provided for herein or other IL-2 muteins known to one of skill in the art.

[0505] In some embodiments, if the therapeutic compound comprises a Fc portion, the Fc domain, (portion) bears mutations to render the Fc region “effectorless,” that is unable to bind FcRs. The mutations that render Fc regions effectorless are known. In some embodiments, the mutations in the Fc region, which is according to the known numbering system, are selected from the group consisting of: K322A, L234A, L235A, G237A, L234F, L235 E, N297, P331S, or any combination thereof. In some embodiments, the Fc mutations comprises a mutation at L234 and/or L235 and/or G237. In some embodiments, the Fc mutations comprise L234A and/or L235A mutations, which can be referred to as LALA mutations. In some embodiments, the Fc mutations comprise L234A, L235A, and G237A mutations.

[0506] Disclosed herein are Linker Region polypeptides, therapeutic peptides, and nucleic acids encoding the polypeptides (e.g. therapeutic compounds), vectors comprising the nucleic acid sequences, and cells comprising the nucleic acids or vectors

[0507] Therapeutic compounds can comprise a plurality of specific targeting moieties. In some embodiments, the therapeutic compound comprises a plurality one specific targeting moiety, a plurality of copies of a donor specific targeting moiety or a plurality of tissue specific targeting moieties. In some embodiments, a therapeutic compound comprises a first and a second donor specific targeting moiety, e.g., a first donor specific targeting moiety specific for a first donor target and a second donor specific targeting moiety specific for a second donor target, e.g., wherein the first and second target are found on the same donor tissue. In some embodiments, the therapeutic compound comprises e.g., a first specific targeting moiety for a tissue specific target and a second specific targeting moiety for a second target, e.g., wherein the first and second target are found on the same or different target tissue.

[0508] In some embodiments, a therapeutic compound comprises a plurality of effector binding/modulating moieties each comprising an ICIM binding/modulating moiety, the number of ICIM binding/modulating moieties is sufficiently low that clustering of the ICIM binding/modulating moiety's ligand on immune cells (in the absence of target binding) is minimized, e.g., to avoid systemic agonizing of immune cells in the absence of binding of the therapeutic compound to target.

[0509] In some embodiments, the therapeutic compound has the formula from N-terminus to C-terminus:
[0510] A1—Linker A—A2—Linker B—A3
[0511] A3—Linker A—A2—Linker B—A1,
   wherein,
[0512] A1 and A3, each independently comprises an effector binding/modulating moiety, e.g., an WWI binding/modulating moiety, an IIC binding/modulating moiety, ICSM binding/modulating moiety, or an SM binding/modulating moiety; or a specific targeting moiety,
[0513] A2 comprises an Fc region or is absent; and
[0514] Linker A and Linker B, each are independent linkers.

[0515] In Some Embodiments:
[0516] A1 comprises an IL-2 mutein molecule,
[0517] A3 comprises a specific targeting moiety, e.g. anti-human MAdCAM Ab, such as a scFv,
[0518] A2 comprises an Fc region, and
[0519] Linker A and Linker B, each are independent linkers further comprising glycine/serine linkers.

[0520] In some embodiments, a polypeptide is provided, wherein the polypeptide comprises a peptide of the formula:

[0521] Ab-ConstantDomain-LinkerA-IL2 Mutein-LinkerB-FcRegion, wherein the Ab is a variable heavy chain domain that binds to MAdCAM, the Constant domain is an Ig constant domain such as IgG1, IgG2, IgG3, or IgG4, Linker A is a linker, such as those provided herein, and the IL2 Mutein is an IL-2 mutein, such as those provided for herein. In some embodiments, the variable heavy domain is a variable heavy chain domain as illustrated in Table 7. In some embodiments, the variable heavy chain domain comprises the variable heavy chain domain of Clone ID: 6, 75, or 79 of Table 7; MIAB126, MIAB197 of Table 9, or MIAB204 of Table 11. In some embodiments, the variable heavy chain domain comprises the CDRs of the heavy domain of 6, 75, or 79 of Table 7; MIAB126, or MIAB197 of Table 9. In some embodiments, the VH comprises a sequence of SEQ ID NO: 414, SEQ ID NO: 591, SEQ ID NO: 599, SEQ ID NO: 880, and SEQ ID NO: 1387.

[0522] In some embodiments, the ConstantDomain comprises a IgG1 constant domain, such as those provided for herein. In some embodiments, the constant domain comprises mutations to render the constant region “effectorless,” that is unable to bind FcRs. The mutations that render constant regions effectorless are known. In some embodiments, the mutations in the constant region, which is according to the known numbering system, are selected from the group consisting of: K322A, L234A, L235A, G237A, L234F, L235 E, N297, P331S, or any combination thereof. In some embodiments, the constant region mutations comprises a mutation at L234 and/or L235 and/or G237. In some embodiments, the constant region mutations comprise L234A and/or L235A mutations, which can be referred to as LALA mutations. In some embodiments, the constant region mutations comprise L234A, L235A, and G237A mutations. In some embodiments, the ConstantDomain comprises SEQ ID NO: 44.

[0523] In some embodiments, the MAdCAM antibody is selected from the following table:

TABLE 15

| Clone | scFv VH | scFV VK | | | | | | |
|---|---|---|---|---|---|---|---|---|
| (scFv) | Seq | Seq | HCDR1 | HCDR2 | HCDR3 | LCDRI | LCDR2 | LCDR3 |
| MIAB212 | EVQLLESGGG | DIQMTQSPSS | FTFSS | SYISG | CARDR | RASQS | SSLQS | QQYKS |
| | LVQPGGSLRL | LSASVGDRVT | YWMH | SGGYT | PYYYD | ISSSL | (SEQ | YPVT |
| | SCAASGFTFS | ITCRASQSIS | (SEQ | NYA | MDVW | A | ID | (SEQ |
| | SYWMHWVRQA | SSLAWYQQKP | ID | (SEQ | (SEQ | (SEQ | NO: | ID |
| | PGKGLEWVSY | GKAPKLLIYA | NO: | ID | ID | ID | 1497) | NO: |
| | ISGSGGYTNY | ASSLQSGVPS | 1499) | NO: | NO: | NO: | | 1498) |
| | ADSVKGRFTI | RFSGSGSGTD | | 1506) | 1507) | 1502) | | |
| | SRDNSKNTLY | FTLTISSLQP | | | | | | |
| | LQMNSLRAED | EDFATYYCQQ | | | | | | |
| | TAVYYCARDR | YKSYPVTFGQ | | | | | | |
| | PYYYDMDVWG | GTKVEIK | | | | | | |
| | KGTTVTVSS | (SEQ ID | | | | | | |
| | (SEQ ID | NO: 1367) | | | | | | |
| | NO: 1445) | | | | | | | |
| MIAB213 | EVQLLESGGG | DIQMTQSPSS | FTFSS | SYISG | CARDR | RASQS | SSLQS | QQYKS |
| | LVQPGGSLRL | LSASVGDRVT | YWMH | SGGYT | PYYYD | ISSSL | (SEQ | YPVT |
| | SCAASGFTFS | ITCRASQSIS | (SEQ | NYA | IDVW | A | ID | (SEQ |
| | SYWMHWVRQA | SSLAWYQQKP | ID | (SEQ | (SEQ | (SEQ | NO: | ID |
| | PGKGLEWVSY | GKAPKLLIYA | NO: | ID | ID | ID | 1497) | NO: |
| | ISGSGGYTNY | ASSLQSGVPS | 1499) | NO: | NO: | NO: | | 1498) |
| | ADSVKGRFTI | RFSGSGSGTD | | 1506) | 1531) | 1502) | | |
| | SRDNSKNTLY | FTLTISSLQP | | | | | | |
| | LQMNSLRAED | EDFATYYCQQ | | | | | | |
| | TAVYYCARDR | YKSYPVTFGQ | | | | | | |
| | PYYYDIDVWG | GTKVEIK | | | | | | |
| | KGTTVTVSS | (SEQ ID | | | | | | |
| | (SEQ ID | NO: 1367) | | | | | | |
| | NO: 1477) | | | | | | | |
| MIAB214 | EVQLLESGGG | DIQMTQSPSS | FTFSS | SYISG | CARDR | RASQS | SSLQS | QQYKS |
| | LVQPGGSLRL | LSASVGDRVT | YWMH | SGGYT | PYYYD | ISSSL | (SEQ | YPVT |
| | SCAASGFTFS | ITCRASQSIS | (SEQ | NYA | LDVW | A | ID | (SEQ |
| | SYWMHWVRQA | SSLAWYQQKP | ID | (SEQ | (SEQ | (SEQ | NO: | ID |
| | PGKGLEWVSY | GKAPKLLIYA | NO: | ID | ID | ID | 1497) | NO: |
| | ISGSGGYTNY | ASSLQSGVPS | 1499) | NO: | NO: | NO: | | 1498) |
| | ADSVKGRFTI | RFSGSGSGTD | | 1506) | 1532) | 1502) | | |
| | SRDNSKNTLY | FTLTISSLQP | | | | | | |
| | LQMNSLRAED | EDFATYYCQQ | | | | | | |
| | TAVYYCARDR | YKSYPVTFGQ | | | | | | |
| | PYYYDLDVWG | GTKVEIK | | | | | | |
| | KGTTVTVSS | (SEQ ID | | | | | | |
| | (SEQ ID | NO: 1367) | | | | | | |
| | NO: 1480) | | | | | | | |

[0524] Although the antibodies described in Table 15 or throughout the present application may be referenced in a scFv format, the antibodies can also be made in other formats as provided for herein.

[0525] In some embodiments, the variable heavy chain domain comprises a first CDR of SEQ ID NO: 90, a second CDR of SEQ ID NO: 91, and a third CDR of SEQ ID NO: 92. In some embodiments, the variable heavy chain domain comprises a first CDR of SEQ ID NO: 359, a second CDR of SEQ ID NO: 170, and a third CDR of SEQ ID NO: 360. In some embodiments, the variable heavy chain domain comprises a first CDR of SEQ ID NO: 135, a second CDR of SEQ ID NO: 381, and a third CDR of SEQ ID NO: 382. In some embodiments, the variable heavy chain domain comprises a first CDR of SEQ ID NO: 135, a second CDR of SEQ ID NO: 381, and a third CDR of SEQ ID NO: 1342. In some embodiments, the variable heavy chain domain comprises a first CDR of SEQ ID NO: 359, a second CDR of SEQ ID NO: 170, and a third CDR of SEQ ID NO: 1431. These are illustrative only and the CDR sets as set forth herein and in the tables are also provided.

[0526] In some embodiments, the LinkerA is a glycine/serine linker, which can be any glycine/serine linker provided for herein. In some embodiments, the linker comprises a sequence of GGGGSGGGGSGGGGSGGGGS (SEQ ID NO: 22), or GGGGSGGGGSGGGGS (SEQ ID NO: 30). These are non-limiting examples and the linker can have varying number of GGGGS (SEQ ID NO: 23) or GGGGA repeats (SEQ ID NO: 29), or a mixture of the two. In some embodiments, the linker comprises 1, 2, 3, 4, 5, 6, 7, 8, 9, or 10 of the GGGGS (SEQ ID NO: 23) and/or GGGGA repeats (SEQ ID NO: 29) (repeats disclosed as SEQ ID NOS 1550-1551, respectively). In some embodiments, the linker is 10 amino acids in length. In some embodiments, the linker is 5 amino acids in length. In some embodiments, the linker is 15 amino acids in length. In some embodiments, the linker is 20 amino acids in length. In some embodiments, the linker is 25 amino acids in length. In some embodiments, the linker is 30 amino acids in length. In some embodiments, the linker is 35 amino acids in length. In some embodiments, the linker is from 5-50 amino acids in length.

[0527] In some embodiments, the IL-2 mutein comprises a sequence of SEQ ID NO: 31. In some embodiments, the IL-2 mutein comprises a sequence of SEQ ID NO: 32. In some embodiments, the IL-2 mutein comprises a sequence of SEQ ID NO: 33. In some embodiments, the IL-2 mutein comprises a sequence of SEQ ID NO: 34. In some embodiments, the IL-2 mutein comprises a sequence of SEQ ID NO: 35. In some embodiments, the IL-2 mutein comprises a sequence of SEQ ID NO: 36. In some embodiments, the IL-2 mutein comprises a sequence of SEQ ID NO: 37. In some embodiments, the IL-2 mutein comprises a sequence of SEQ ID NO: 38. In some embodiments, the IL-2 mutein comprises a sequence of SEQ ID NO: 39. In some embodiments, the IL-2 mutein comprises a sequence of SEQ ID NO: 40. In some embodiments, the IL-2 mutein comprises a sequence of SEQ ID NO: 41. In some embodiments, the IL-2 mutein further comprises a T3A substitution (mutation). In some embodiments, the Fc Region comprises a peptide having a sequence of SEQ ID NO: 21. In some embodiments, the Fc Region comprises a peptide having a sequence of SEQ ID NO: 28. In some embodiments, the C-terminus of the Fc Region is linked to the N-terminus or the C-terminus of the variable heavy chain or IL-2 mutein. In some embodiments, the linker linking the Fc Region to the variable heavy chain or the IL-2 mutein is a glycine/serine or a glycine/alanine linker. In some embodiments, the linker linking the Fc region to the C- or N-terminus of the variable heavy chain or IL-2 mutein is a glycine/serine linker, which can be a sequence of GGGGSGGGGSGGGGSGGGGS (SEQ ID NO: 22) or GGGGSGGGGSGGGGS (SEQ ID NO: These are non-limiting examples and the linker can have varying number of GGGGS (SEQ ID NO: 23) or GGGGA repeats (SEQ ID NO: 29), or a mixture of the two. In some embodiments, the linker comprises 1, 2, 3, 4, 5, 6, 7, 8, 9, or 10 of the GGGGS (SEQ ID NO: 23) and/or GGGGA repeats (SEQ ID NO: 29) (repeats disclosed as SEQ ID NOS 1550-1551, respectively). In some embodiments, the linker is 10 amino acids in length. In some embodiments, the linker is 5 amino acids in length. In some embodiments, the linker is 15 amino acids in length. In some embodiments, the linker is 20 amino acids in length. In some embodiments, the linker is 25 amino acids in length. In some embodiments, the linker is 30 amino acids in length. In some embodiments, the linker is 35 amino acids in length. In some embodiments, the linker is from 5-50 amino acids in length.

[0528] In some embodiments, the polypeptide further comprises a polypeptide of formula VL-ConstantDomainLight, wherein VL is a variable light chain and ConstantDomainLight is a IgG light chain constant domain, wherein the polypeptide can be or is associated with the polypeptide having the formula of Ab-ConstantDomain-LinkerA-IL2 Mutein-LinkerB-FcRegion. In some embodiments, the VL comprises a sequence of SEQ ID NO: 415, SEQ ID NO: 592, SEQ ID NO: 600 or SEQ ID NO: 1363. These are illustrative only and the VL domain can be VL/VK sequence provided for herein, such as in Table 7, or Table 9. In some embodiments, the variable light chain domain comprises a first CDR of SEQ ID NO: 93, a second CDR of SEQ ID NO: 87, and a third CDR of SEQ ID NO: 94. In some embodiments, the variable light chain domain comprises a first CDR of SEQ ID NO: 361, a second CDR of SEQ ID NO: 362, and a third CDR of SEQ ID NO: 363. In some embodiments, the variable heavy chain domain comprises a first CDR of SEQ ID NO: 383, a second CDR of SEQ ID NO: 384, and a third CDR of SEQ ID NO: 385. In some embodiments, the variable heavy chain domain comprises a first CDR of SEQ ID NO: 383, a second CDR of SEQ ID NO: 241, and a third CDR of SEQ ID NO: 652. In some embodiments, the variable heavy chain domain comprises a first CDR of SEQ ID NO: 1408, a second CDR of SEQ ID NO: 362, and a third CDR of SEQ ID NO: 363. These are illustrative only and the CDR sets as set forth herein and in the tables are also provided.

[0529] In some embodiments, the constant domain also comprises mutations to negate the effector function, such as those provided for herein. In some embodiments, the ConstantDomainLight comprises a sequence of:

(SEQ ID NO: 45)
RTVAAPSVFIFPPSDEQLKSGTASVVCLLNNFYPREAKVQWKVDNALQSG
NSQESVTEQDSKDSTYSLSSTLTLSKADYEKHKVYACEVTHQGLSSPVTK
SFNRGEC

[0530] The different polypeptides of formula IL2 Mutein-LinkerA-FcRegion-LinkerB-Ab and VL-ConstantDomainLight can be interchanged with one another. In some embodiments, the polypeptide comprises a variable heavy chain comprising a first CDR of SEQ ID NO: 90, a second CDR of SEQ ID NO: 91, and a third CDR of SEQ ID NO: 92 and a variable light chain comprising a first CDR of SEQ ID NO: 93, a second CDR of SEQ ID NO: 87, and a third CDR of SEQ ID NO: 94. In some embodiments, the polypeptide comprises a variable heavy chain comprising a first CDR of SEQ ID NO: 359, a second CDR of SEQ ID NO: 170, and a third CDR of SEQ ID NO: 360 and a variable light chain comprising a first CDR of SEQ ID NO: 361, a second CDR of SEQ ID NO: 362, and a third CDR of SEQ ID NO: 363. In some embodiments, the polypeptide comprises a variable heavy chain comprising a first CDR of SEQ ID NO: 135, a second CDR of SEQ ID NO: 381, and a third CDR of SEQ ID NO: 382 and a variable light chain comprising a first CDR of SEQ ID NO: 383, a second CDR of SEQ ID NO: 384, and a third CDR of SEQ ID NO: 385. In some embodiments, the polypeptide comprises a variable heavy chain comprising a first CDR of SEQ ID NO: 135, a second CDR of SEQ ID NO: 381, and a third CDR of SEQ ID NO: 1342; and a variable light chain comprising a first CDR of SEQ ID NO: 383, a second CDR of SEQ ID NO: 241, and a third CDR of SEQ ID NO: 652. In some embodiments, the polypeptide comprises a variable heavy chain comprising a first CDR of SEQ ID NO: 359, a second CDR of SEQ ID NO: 170, and a third CDR of SEQ ID NO: 1431; and a variable light chain comprising a first CDR of SEQ ID NO: 1408, a second CDR of SEQ ID NO: 362, and a third CDR of SEQ ID NO: 363. These are non-limiting examples and the CDR combinations as illustrated in the Table 9 and Table 14 can be also be used and are provided for herein.

[0531] In some embodiments, compounds are provided comprising the following formula, from N-terminus to C-terminus:

[0532] IL2 Mutein-LinkerA-FcRegion-LinkerB-Ab, wherein the IL2 Mutein is any IL-2 mutein that can, for example, preferentially activate Tregs; the LinkerA and Linker B are, each, independently, a linker as provided herein, the Fc Region can any one of such as provided herein, and the Ab is a tissue targeting moiety, such as those provided herein. In some embodiments, the Ab is an antibody that binds to MAdCAM or another cell surface target as provided herein. In some embodiments, the antibody is in a scFv format. In some embodiments, the antibody is in a Fab format. In some embodiments, the antibody in a Fab format is an antibody as provided in Table 9. In some embodiments, the antibody in a Fab format is an antibody that comprises the CDRs as set forth in Table 9. In some embodiments, the antibody in scFV format is an antibody as provided in the Table 6 or Table 14. In some embodiments, the antibody in scFV format is an antibody that comprises the CDRs as set forth in Table 6, Table 7, Table 11, or Table 14.

[0533] In some embodiments, the C-terminus of the IL-2 mutein is linked to the N-terminus of the Fc region. In some embodiments, the linkage is direct or through a linker, such as those described herein. In some embodiments, the linker is a glycine/serine linker. In some embodiments, the linker linking the IL-2 mutein to the Fc region is a glycine/serine linker, which can be a sequence of GGGGSGGGGSGGGGSGGGGS (SEQ ID NO: 22), or GGGGSGGGGSGGGGS (SEQ ID NO: 30). These are non-limiting examples and the linker can have varying number of GGGGS (SEQ ID NO: 23), or GGGGA repeats (SEQ ID NO: 29), or a mixture of the two. In some embodiments, the linker comprises 1, 2, 3, 4, 5, 6, 7, 8, 9, or 10 of the GGGGS (SEQ ID NO: 23) and/or GGGGA repeats (SEQ ID NO: 29) (repeats disclosed as SEQ ID NOS 1550-1551, respectively). In some embodiments, the linker is 10 amino acids in length. In some embodiments, the linker is 5 amino acids in length. In some embodiments, the linker is 15 amino acids in length. In some embodiments, the linker is 20 amino acids in length. In some embodiments, the linker is 25 amino acids in length. In some embodiments, the linker is 30 amino acids in length. In some embodiments, the linker is 35 amino acids in length. In some embodiments, the linker is from 5-50 amino acids in length.

[0534] In some embodiments, the IL-2 mutein comprises a sequence of SEQ ID NO: 31. In some embodiments, the IL-2 mutein comprises a sequence of SEQ ID NO: 32. In some embodiments, the IL-2 mutein comprises a sequence of SEQ ID NO: 33. In some embodiments, the IL-2 mutein comprises a sequence of SEQ ID NO: 34. In some embodiments, the IL-2 mutein comprises a sequence of SEQ ID NO: 35. In some embodiments, the IL-2 mutein comprises a sequence of SEQ ID NO: 36. In some embodiments, the IL-2 mutein comprises a sequence of SEQ ID NO: 37. In some embodiments, the IL-2 mutein comprises a sequence of SEQ ID NO: 38. In some embodiments, the IL-2 mutein comprises a sequence of SEQ ID NO: 39. In some embodiments, the IL-2 mutein comprises a sequence of SEQ ID NO: 40. In some embodiments, the IL-2 mutein comprises a sequence of SEQ ID NO: 41. In some embodiments, the IL-2 mutein further comprises a T3A substitution (mutation). In some embodiments, the Fc Region comprises a peptide having a sequence of SEQ ID NO: 21. In some embodiments, the Fc Region comprises a peptide having a sequence of SEQ ID NO: 28. In some embodiments, the C-terminus of the Fc Region is linked to the N-terminus of the variable heavy chain. In some embodiments, the linker linking the Fc Region to the variable heavy chain is a glycine/serine or a glycine/alanine linker. In some embodiments, the linker linking the Fc region to the N-terminus of the variable heavy chain is a glycine/serine linker, which can be a sequence of GGGGSGGGGSGGGGSGGGGS (SEQ ID NO: 22) or GGGGSGGGGSGGGGS (SEQ ID NO: 30). These are non-limiting examples and the linker can have varying number of GGGGS (SEQ ID NO: 23) or GGGGA repeats (SEQ ID NO: 29), or a mixture of the two. In some embodiments, the linker comprises 1, 2, 3, 4, 5, 6, 7, 8, 9, or 10 of the GGGGS (SEQ ID NO: 23) and/or GGGGA repeats (SEQ ID NO: 29) (repeats disclosed as SEQ ID NOS 1550-1551, respectively). In some embodiments, the linker is 10 amino acids in length. In some embodiments, the linker is 5 amino acids in length. In some embodiments, the linker is 15 amino acids in length. In some embodiments, the linker is 20 amino acids in length. In some embodiments, the linker is 25 amino acids in length. In some embodiments, the linker is 30 amino acids in length. In some embodiments, the linker is 35 amino acids in length. In some embodiments, the linker is from 5-50 amino acids in length.

[0535] In some embodiments, the variable heavy chain comprises the CDRs as set forth in Table 6, Table 7, Table 9, or Table 14. In some embodiments, the variable heavy chain comprises a HCDR1, HCDR2, and a HCDR3, wherein the HCDR1, HCDR2, and a HCDR3 are as set forth in Table 6, Table 7, Table 9, or Table 14. In some embodiments, the variable heavy chain has a HCDR1, HCDR2, and a HCDR3 as set forth for Clone 1 in Table 6. In some embodiments, the variable heavy chain has a HCDR1, HCDR2, and a HCDR3 as set forth for Clone 2 in Table 6. In some embodiments, the variable heavy chain has a HCDR1, HCDR2, and a HCDR3 as set forth for Clone 3 in Table 6. In some embodiments, the variable heavy chain has a HCDR1, HCDR2, and a HCDR3 as set forth for Clone 4 in Table 6. In some embodiments, the variable heavy chain has a HCDR1, HCDR2, and a HCDR3 as set forth for Clone 5 in Table 6. In some embodiments, the variable heavy chain has a HCDR1, HCDR2, and a HCDR3 as set forth for Clone 6 in Table 6. In some embodiments, the variable heavy chain has a HCDR1, HCDR2, and a HCDR3 as set forth for Clone 7 in Table 6. In some embodiments, the variable heavy chain has a HCDR1, HCDR2, and a HCDR3 as set forth for Clone 8 in Table 6. In some embodiments, the variable heavy chain has a HCDR1, HCDR2, and a HCDR3 as set forth for Clone 9 in Table 6. In some embodiments, the variable heavy chain has a HCDR1, HCDR2, and a HCDR3 as set forth for Clone 10 in Table 6. In some embodiments, the variable heavy chain has a HCDR1, HCDR2, and a HCDR3 as set forth for Clone 11 in Table 6. In some embodiments, the variable heavy chain has a HCDR1, HCDR2, and a HCDR3 as set forth for Clone 12 in Table 6. In some embodiments, the variable heavy chain has a HCDR1, HCDR2, and a HCDR3 as set forth for Clone 13 in Table 6. In some embodiments, the variable heavy chain has a HCDR1, HCDR2, and a HCDR3 as set forth for Clone 14 in Table 6. In some embodiments, the variable heavy chain has a HCDR1, HCDR2, and a HCDR3 as set forth for Clone 15 in Table 6. In some embodiments, the variable heavy chain has a HCDR1, HCDR2, and a HCDR3 as set forth for Clone 16 in Table 6. In some embodiments, the variable heavy chain has a HCDR1, HCDR2, and a HCDR3 as set forth for Clone 17 in Table 6. In some embodiments, the variable heavy chain has a HCDR1, HCDR2, and a HCDR3 as set forth for Clone 1 in Table 6. In some embodiments, the variable heavy chain has a HCDR1, HCDR2, and a HCDR3 as set forth for Clone 18 in Table 6. In some embodiments, the variable heavy chain has a HCDR1, HCDR2, and a HCDR3 as set forth for Clone 19 in Table 6. In some embodiments, the variable heavy chain has a HCDR1, HCDR2, and a HCDR3 as set forth for Clone 20 in Table 6. In some embodiments, the variable heavy chain has a HCDR1, HCDR2, and a HCDR3 as set forth for Clone 21 in Table 6. In some embodiments, the variable heavy chain has a HCDR1, HCDR2, and a HCDR3 as set forth for Clone 22 in Table 6. In some embodiments, the variable heavy chain has a HCDR1, HCDR2, and a HCDR3 as set forth for Clone 23 in Table 6. In some embodiments, the variable heavy chain has a HCDR1, HCDR2, and a HCDR3 as set forth for Clone 24 in Table 6. In some embodiments, the variable heavy chain has a HCDR1, HCDR2, and a HCDR3 as set forth for Clone 25 in Table 6. In some embodiments, the variable heavy chain has a HCDR1, HCDR2, and a HCDR3 as set forth for Clone 26 in Table 6. In some embodiments, the variable heavy chain has a HCDR1, HCDR2, and a HCDR3 as set forth for Clone 27 in Table 6. In some embodiments, the variable heavy chain has a HCDR1, HCDR2, and a HCDR3 as set forth for Clone 28 in Table 6. In some embodiments, the variable heavy chain has a HCDR1, HCDR2, and a HCDR3 as set forth for Clone 29 in Table 6. In some embodiments, the variable heavy chain has a HCDR1, HCDR2, and a HCDR3 as set forth for Clone 30 in Table 6. In some embodiments, the variable heavy chain has a HCDR1, HCDR2, and a HCDR3 as set forth for Clone 31 in Table 6. In some embodiments, the variable heavy chain has a HCDR1, HCDR2, and a HCDR3 as set forth for Clone 32 in Table 6. In some embodiments, the variable heavy chain has a HCDR1, HCDR2, and a HCDR3 as set forth for Clone 33 in Table 6. In some embodiments, the variable heavy chain has a HCDR1, HCDR2, and a HCDR3 as set forth for Clone 34 in Table 6. In some embodiments, the variable heavy chain has a HCDR1, HCDR2, and a HCDR3 as set forth for Clone 35 in Table 6. In some embodiments, the variable heavy chain has a HCDR1, HCDR2, and a HCDR3 as set forth for Clone 36 in Table 6. In some embodiments, the variable heavy chain has a HCDR1, HCDR2, and a HCDR3 as set forth for Clone 37 in Table 6. In some embodiments, the variable heavy chain has a HCDR1, HCDR2, and a HCDR3 as set forth for Clone 38 in Table 6. In some embodiments, the variable heavy chain has a HCDR1, HCDR2, and a HCDR3 as set forth for Clone 39 in Table 6. In some embodiments, the variable heavy chain has a HCDR1, HCDR2, and a HCDR3 as set forth for Clone 40 in Table 6. In some embodiments, the variable heavy chain has a HCDR1, HCDR2, and a HCDR3 as set forth for Clone 41 in Table 6. In some embodiments, the variable heavy chain has a HCDR1, HCDR2, and a HCDR3 as set forth for Clone 42 in Table 6. In some embodiments, the variable heavy chain has a HCDR1, HCDR2, and a HCDR3 as set forth for Clone 43 in Table 6. In some embodiments, the variable heavy chain has a HCDR1, HCDR2, and a HCDR3 as set forth for Clone 44 in Table 6. In some embodiments, the variable heavy chain has a HCDR1, HCDR2, and a HCDR3 as set forth for Clone 45 in Table 6. In some embodiments, the variable heavy chain has a HCDR1, HCDR2, and a HCDR3 as set forth for Clone 46 in Table 6. In some embodiments, the variable heavy chain has a HCDR1, HCDR2, and a HCDR3 as set forth for Clone 47 in Table 6. In some embodiments, the variable heavy chain has a HCDR1, HCDR2, and a HCDR3 as set forth for Clone 48 in Table 6. In some embodiments, the variable heavy chain has a HCDR1, HCDR2, and a HCDR3 as set forth for Clone 49 in Table 6. In some embodiments, the variable heavy chain has a HCDR1, HCDR2, and a HCDR3 as set forth for Clone 50 in Table 6. In some embodiments, the variable heavy chain has a HCDR1, HCDR2, and a HCDR3 as set forth for Clone 51 in Table 6. In some embodiments, the variable heavy chain has a HCDR1, HCDR2, and a HCDR3 as set forth for Clone 52 in Table 6. In some embodiments, the variable heavy chain has a HCDR1, HCDR2, and a HCDR3 as set forth for Clone 53 in Table 6. In some embodiments, the variable heavy chain has a HCDR1, HCDR2, and a HCDR3 as set forth for Clone 54 in Table 6. In some embodiments, the variable heavy chain has a HCDR1, HCDR2, and a HCDR3 as set forth for Clone 55 in Table 6. In some embodiments, the variable heavy chain has a HCDR1, HCDR2, and a HCDR3 as set forth for Clone 56 in Table 6. In some embodiments, the variable heavy chain has a HCDR1, HCDR2, and a HCDR3 as set forth for Clone 57 in Table 6. In some embodiments, the variable heavy chain has a HCDR1, HCDR2, and a HCDR3 as set forth for Clone 58 in Table 6. In some embodiments, the variable heavy chain has a HCDR1, HCDR2, and a HCDR3 as set forth for Clone 59 in Table 6. In some embodiments, the variable heavy chain has a HCDR1, HCDR2, and a HCDR3 as set forth for Clone 60 in Table 6. In some embodiments, the variable heavy chain has a HCDR1, HCDR2, and a HCDR3 as set forth for Clone 61 in Table 6. In some embodiments, the variable heavy chain has a HCDR1, HCDR2, and a HCDR3 as set forth for Clone 62 in Table 6. In some embodiments, the variable heavy chain has a HCDR1, HCDR2, and a HCDR3 as set forth for Clone 63 in Table 6. In some embodiments, the variable heavy chain has a HCDR1, HCDR2, and a HCDR3 as set forth for Clone 64 in Table 6. In some embodiments, the variable heavy chain has a HCDR1, HCDR2, and a HCDR3 as set forth for Clone 65 in Table 6. In some embodiments, the variable heavy chain has a HCDR1, HCDR2, and a HCDR3 as set forth for Clone 66 in Table 6.

[0536] In some embodiments, the variable heavy chain has a HCDR1, HCDR2, and a HCDR3 as set forth for Clone 1 in Table 7. In some embodiments, the variable heavy chain has a HCDR1, HCDR2, and a HCDR3 as set forth for Clone 2 in Table 7. In some embodiments, the variable heavy chain has a HCDR1, HCDR2, and a HCDR3 as set forth for Clone 3 in Table 7. In some embodiments, the variable heavy chain has a HCDR1, HCDR2, and a HCDR3 as set forth for Clone 4 in Table 7. In some embodiments, the variable heavy chain has a HCDR1, HCDR2, and a HCDR3 as set forth for Clone 5 in Table 7. In some embodiments, the variable heavy chain has a HCDR1, HCDR2, and a HCDR3 as set forth for Clone 6 in Table 7. In some embodiments, the variable heavy chain has a HCDR1, HCDR2, and a HCDR3 as set forth for Clone 7 in Table 7. In some embodiments, the variable heavy chain has a HCDR1, HCDR2, and a HCDR3 as set forth for Clone 8 in Table 7. In some embodiments, the variable heavy chain has a HCDR1, HCDR2, and a HCDR3 as set forth for Clone 9 in Table 7. In some embodiments, the variable heavy chain has a HCDR1, HCDR2, and a HCDR3 as set forth for Clone 10 in Table 7. In some embodiments, the variable heavy chain has a HCDR1, HCDR2, and a HCDR3 as set forth for Clone 11 in Table 7. In some embodiments, the variable heavy chain has a HCDR1, HCDR2, and a HCDR3 as set forth for Clone 12 in Table 7. In some embodiments, the variable heavy chain has a HCDR1, HCDR2, and a HCDR3 as set forth for Clone 13 in Table 7. In some embodiments, the variable heavy chain has a HCDR1, HCDR2, and a HCDR3 as set forth for Clone 14 in Table 7. In some embodiments, the variable heavy chain has a HCDR1, HCDR2, and a HCDR3 as set forth for Clone 15 in Table 7. In some embodiments, the variable heavy chain has a HCDR1, HCDR2, and a HCDR3 as set forth for Clone 16 in Table 7. In some embodiments, the variable heavy chain has a HCDR1, HCDR2, and a HCDR3 as set forth for Clone 17 in Table 7. In some embodiments, the variable heavy chain has a HCDR1, HCDR2, and a HCDR3 as set forth for Clone 1 in Table 7. In some embodiments, the variable heavy chain has a HCDR1, HCDR2, and a HCDR3 as set forth for Clone 18 in Table 7. In some embodiments, the variable heavy chain has a HCDR1, HCDR2, and a HCDR3 as set forth for Clone 19 in Table 7. In some embodiments, the variable heavy chain has a HCDR1, HCDR2, and a HCDR3 as set forth for Clone 20 in Table 7. In some embodiments, the variable heavy chain has a HCDR1, HCDR2, and a HCDR3 as set forth for Clone 21 in Table 7. In some embodiments, the variable heavy chain has a HCDR1, HCDR2, and a HCDR3 as set forth for Clone 22 in Table 7. In some embodiments, the variable heavy chain has a HCDR1, HCDR2, and a HCDR3 as set forth for Clone 23 in Table 7. In some embodiments, the variable heavy chain has a HCDR1, HCDR2, and a HCDR3 as set forth for Clone 24 in Table 7. In some embodiments, the variable heavy chain has a HCDR1, HCDR2, and a HCDR3 as set forth for Clone 25 in Table 7. In some embodiments, the variable heavy chain has a HCDR1, HCDR2, and a HCDR3 as set forth for Clone 26 in Table 7. In some embodiments, the variable heavy chain has a HCDR1, HCDR2, and a HCDR3 as set forth for Clone 27 in Table 7. In some embodiments, the variable heavy chain has a HCDR1, HCDR2, and a HCDR3 as set forth for Clone 28 in Table 7. In some embodiments, the variable heavy chain has a HCDR1, HCDR2, and a HCDR3 as set forth for Clone 29 in Table 7. In some embodiments, the variable heavy chain has a HCDR1, HCDR2, and a HCDR3 as set forth for Clone 30 in Table 7. In some embodiments, the variable heavy chain has a HCDR1, HCDR2, and a HCDR3 as set forth for Clone 31 in Table 7. In some embodiments, the variable heavy chain has a HCDR1, HCDR2, and a HCDR3 as set forth for Clone 32 in Table 7. In some embodiments, the variable heavy chain has a HCDR1, HCDR2, and a HCDR3 as set forth for Clone 33 in Table 7. In some embodiments, the variable heavy chain has a HCDR1, HCDR2, and a HCDR3 as set forth for Clone 34 in Table 7. In some embodiments, the variable heavy chain has a HCDR1, HCDR2, and a HCDR3 as set forth for Clone 35 in Table 7. In some embodiments, the variable heavy chain has a HCDR1, HCDR2, and a HCDR3 as set forth for Clone 36 in Table 7. In some embodiments, the variable heavy chain has a HCDR1, HCDR2, and a HCDR3 as set forth for Clone 37 in Table 7. In some embodiments, the variable heavy chain has a HCDR1, HCDR2, and a HCDR3 as set forth for Clone 38 in Table 7. In some embodiments, the variable heavy chain has a HCDR1, HCDR2, and a HCDR3 as set forth for Clone 39 in Table 7. In some embodiments, the variable heavy chain has a HCDR1, HCDR2, and a HCDR3 as set forth for Clone 40 in Table 7. In some embodiments, the variable heavy chain has a HCDR1, HCDR2, and a HCDR3 as set forth for Clone 41 in Table 7. In some embodiments, the variable heavy chain has a HCDR1, HCDR2, and a HCDR3 as set forth for Clone 42 in Table 7. In some embodiments, the variable heavy chain has a HCDR1, HCDR2, and a HCDR3 as set forth for Clone 43 in Table 7. In some embodiments, the variable heavy chain has a HCDR1, HCDR2, and a HCDR3 as set forth for Clone 44 in Table 7. In some embodiments, the variable heavy chain has a HCDR1, HCDR2, and a HCDR3 as set forth for Clone 45 in Table 7. In some embodiments, the variable heavy chain has a HCDR1, HCDR2, and a HCDR3 as set forth for Clone 46 in Table 7. In some embodiments, the variable heavy chain has a HCDR1, HCDR2, and a HCDR3 as set forth for Clone 47 in Table 7. In some embodiments, the variable heavy chain has a HCDR1, HCDR2, and a HCDR3 as set forth for Clone 48 in Table 7. In some embodiments, the variable heavy chain has a HCDR1, HCDR2, and a HCDR3 as set forth for Clone 49 in Table 7. In some embodiments, the variable heavy chain has a HCDR1, HCDR2, and a HCDR3 as set forth for Clone 50 in Table 7. In some embodiments, the variable heavy chain has a HCDR1, HCDR2, and a HCDR3 as set forth for Clone 51 in Table 7. In some embodiments, the variable heavy chain has a HCDR1, HCDR2, and a HCDR3 as set forth for Clone 52 in Table 7. In some embodiments, the variable heavy chain has a HCDR1, HCDR2, and a HCDR3 as set forth for Clone 53 in Table 7. In some embodiments, the variable heavy chain has a HCDR1, HCDR2, and a HCDR3 as set forth for Clone 54 in Table 7. In some embodiments, the variable heavy chain has a HCDR1, HCDR2, and a HCDR3 as set forth for Clone 55 in Table 7. In some embodiments, the variable heavy chain has a HCDR1, HCDR2, and a HCDR3 as set forth for Clone 56 in Table 7. In some embodiments, the variable heavy chain has a HCDR1, HCDR2, and a HCDR3 as set forth for Clone 57 in Table 7. In some embodiments, the variable heavy chain has a HCDR1, HCDR2, and a HCDR3 as set forth for Clone 58 in Table 7. In some embodiments, the variable heavy chain has a HCDR1, HCDR2, and a HCDR3 as set forth for Clone 59 in Table 7. In some embodiments, the variable heavy chain has a HCDR1, HCDR2, and a HCDR3 as set forth for Clone 60 in Table 7. In some embodiments, the variable heavy chain has a HCDR1, HCDR2, and a HCDR3 as set forth for Clone 61 in Table 7. In some embodiments, the variable heavy chain has a HCDR1, HCDR2, and a HCDR3 as set forth for Clone 62 in Table 7. In some embodiments, the variable heavy chain has a HCDR1, HCDR2, and a HCDR3 as set forth for Clone 63 in Table 7. In some embodiments, the variable heavy chain has a HCDR1, HCDR2, and a HCDR3 as set forth for Clone 64 in Table 7. In some embodiments, the variable heavy chain has a HCDR1, HCDR2, and a HCDR3 as set forth for Clone 65 in Table 7. In some embodiments, the variable heavy chain has a HCDR1, HCDR2, and a HCDR3 as set forth for Clone 66 in Table 7. In some embodiments, the variable heavy chain has a HCDR1, HCDR2, and a HCDR3 as set forth for Clone 67 in Table 7. In some embodiments, the variable heavy chain has a HCDR1, HCDR2, and a HCDR3 as set forth for Clone 68 in Table 7. In some embodiments, the variable heavy chain has a HCDR1, HCDR2, and a HCDR3 as set forth for Clone 69 in Table 7. In some embodiments, the variable heavy chain has a HCDR1, HCDR2, and a HCDR3 as set forth for Clone 70 in Table 7. In some embodiments, the variable heavy chain has a HCDR1, HCDR2, and a HCDR3 as set forth for Clone 71 in Table 7. In some embodiments, the variable heavy chain has a HCDR1, HCDR2, and a HCDR3 as set forth for Clone 72 in Table 7. In some embodiments, the variable heavy chain has a HCDR1, HCDR2, and a HCDR3 as set forth for Clone 73 in Table 7. In some embodiments, the variable heavy chain has a HCDR1, HCDR2, and a HCDR3 as set forth for Clone 74 in Table 7. In some embodiments, the variable heavy chain has a HCDR1, HCDR2, and a HCDR3 as set forth for Clone 75 in Table 7. In some embodiments, the variable heavy chain has a HCDR1, HCDR2, and a HCDR3 as set forth for Clone 76 in Table 7. In some embodiments, the variable heavy chain has a HCDR1, HCDR2, and a HCDR3 as set forth for Clone 77 in Table 7. In some embodiments, the variable heavy chain has a HCDR1, HCDR2, and a HCDR3 as set forth for Clone 78 in Table 7. In some embodiments, the variable heavy chain has a HCDR1, HCDR2, and a HCDR3 as set forth for Clone 79 in Table 7. In some embodiments, the variable heavy chain has a HCDR1, HCDR2, and a HCDR3 as set forth for Clone 80 in Table 7. In some embodiments, the variable heavy chain has a HCDR1, HCDR2, and a HCDR3 as set forth for Clone 81 in Table 7. In some embodiments, the variable heavy chain has a HCDR1, HCDR2, and a HCDR3 as set forth for Clone 82 in Table 7. In some embodiments, the variable heavy chain has a HCDR1, HCDR2, and a HCDR3 as set forth for Clone 83 in Table 7. In some embodiments, the variable heavy chain has a HCDR1, HCDR2, and a HCDR3 as set forth for Clone 84 in Table 7.

[0537] In some embodiments, the variable heavy chain has a HCDR1, HCDR2, and a HCDR3 as set forth for MIAB1 in Table 9. In some embodiments, the variable heavy chain has a HCDR1, HCDR2, and a HCDR3 as set forth for MIAB2 in Table 9. In some embodiments, the variable heavy chain has a HCDR1, HCDR2, and a HCDR3 as set forth for MIAB3 in Table 9. In some embodiments, the variable heavy chain has a HCDR1, HCDR2, and a HCDR3 as set forth for MIAB4 in Table 9. In some embodiments, the variable heavy chain has a HCDR1, HCDR2, and a HCDR5 as set forth for MIAB1 in Table 9. In some embodiments, the variable heavy chain has a HCDR1, HCDR2, and a HCDR3 as set forth for MIAB6 in Table 9. In some embodiments, the variable heavy chain has a HCDR1, HCDR2, and a HCDR3 as set forth for MIAB7 in Table 9. In some embodiments, the variable heavy chain has a HCDR1, HCDR2, and a HCDR3 as set forth for MIAB8 in Table 9. In some embodiments, the variable heavy chain has a HCDR1, HCDR2, and a HCDR3 as set forth for MIAB9 in Table 9. In some embodiments, the variable heavy chain has a HCDR1, HCDR2, and a HCDR3 as set forth for MIAB10 in Table 9. In some embodiments, the variable heavy chain has a HCDR1, HCDR2, and a HCDR3 as set forth for MIAB11 in Table 9. In some embodiments, the variable heavy chain has a HCDR1, HCDR2, and a HCDR3 as set forth for MIAB12 in Table 9. In some embodiments, the variable heavy chain has a HCDR1, HCDR2, and a HCDR3 as set forth for MIAB13 in Table 9. In some embodiments, the variable heavy chain has a HCDR1, HCDR2, and a HCDR3 as set forth for MIAB14 in Table 9. In some embodiments, the variable heavy chain has a HCDR1, HCDR2, and a HCDR3 as set forth for MIAB15 in Table 9. In some embodiments, the variable heavy chain has a HCDR1, HCDR2, and a HCDR3 as set forth for MIAB16 in Table 9. In some embodiments, the variable heavy chain has a HCDR1, HCDR2, and a HCDR3 as set forth for MIAB17 in Table 9. In some embodiments, the variable heavy chain has a HCDR1, HCDR2, and a HCDR3 as set forth for MIAB18 in Table 9. In some embodiments, the variable heavy chain has a HCDR1, HCDR2, and a HCDR3 as set forth for MIAB19 in Table 9. In some embodiments, the variable heavy chain has a HCDR1, HCDR2, and a HCDR3 as set forth for MIAB20 in Table 9. In some embodiments, the variable heavy chain has a HCDR1, HCDR2, and a HCDR3 as set forth for MIAB21 in Table 9. In some embodiments, the variable heavy chain has a HCDR1, HCDR2, and a HCDR3 as set forth for MIAB22 in Table 9. In some embodiments, the variable heavy chain has a HCDR1, HCDR2, and a HCDR3 as set forth for MIAB23 in Table 9. In some embodiments, the variable heavy chain has a HCDR1, HCDR2, and a HCDR3 as set forth for MIAB24 in Table 9. In some embodiments, the variable heavy chain has a HCDR1, HCDR2, and a HCDR3 as set forth for MIAB25 in Table 9. In some embodiments, the variable heavy chain has a HCDR1, HCDR2, and a HCDR3 as set forth for MIAB26 in Table 9. In some embodiments, the variable heavy chain has a HCDR1, HCDR2, and a HCDR3 as set forth for MIAB27 in Table 9. In some embodiments, the variable heavy chain has a HCDR1, HCDR2, and a HCDR3 as set forth for MIAB28 in Table 9. In some embodiments, the variable heavy chain has a HCDR1, HCDR2, and a HCDR3 as set forth for MIAB29 in Table 9. In some embodiments, the variable heavy chain has a HCDR1, HCDR2, and a HCDR3 as set forth for MIAB30 in Table 9. In some embodiments, the variable heavy chain has a HCDR1, HCDR2, and a HCDR3 as set forth for MIAB31 in Table 9. In some embodiments, the variable heavy chain has a HCDR1, HCDR2, and a HCDR3 as set forth for MIAB32 in Table 9. In some embodiments, the variable heavy chain has a HCDR1, HCDR2, and a HCDR3 as set forth for MIAB33 in Table 9. In some embodiments, the variable heavy chain has a HCDR1, HCDR2, and a HCDR3 as set forth for MIAB34 in Table 9. In some embodiments, the variable heavy chain has a HCDR1, HCDR2, and a HCDR3 as set forth for MIAB35 in Table 9. In some embodiments, the variable heavy chain has a HCDR1, HCDR2, and a HCDR3 as set forth for MIAB36 in Table 9. In some embodiments, the variable heavy chain has a HCDR1, HCDR2, and a HCDR3 as set forth for MIAB37 in Table 9. In some embodiments, the variable heavy chain has a HCDR1, HCDR2, and a HCDR3 as set forth for MIAB38 in Table 9. In some embodiments, the variable heavy chain has a HCDR1, HCDR2, and a HCDR3 as set forth for MIAB39 in Table 9. In some embodiments, the variable heavy chain has a HCDR1, HCDR2, and a HCDR3 as set forth for MIAB40 in Table 9. In some embodiments, the variable heavy chain has a HCDR1, HCDR2, and a HCDR3 as set forth for MIAB41 in Table 9. In some embodiments, the variable heavy chain has a HCDR1, HCDR2, and a HCDR3 as set forth for MIAB42 in Table 9. In some embodiments, the variable heavy chain has a HCDR1, HCDR2, and a HCDR3 as set forth for MIAB43 in Table 9. In some embodiments, the variable heavy chain has a HCDR1, HCDR2, and a HCDR3 as set forth for MIAB44 in Table 9. In some embodiments, the variable heavy chain has a HCDR1, HCDR2, and a HCDR3 as set forth for MIAB45 in Table 9. In some embodiments, the variable heavy chain has a HCDR1, HCDR2, and a HCDR3 as set forth for MIAB46 in Table 9. In some embodiments, the variable heavy chain has a HCDR1, HCDR2, and a HCDR3 as set forth for MIAB47 in Table 9. In some embodiments, the variable heavy chain has a HCDR1, HCDR2, and a HCDR3 as set forth for MIAB48 in Table 9. In some embodiments, the variable heavy chain has a HCDR1, HCDR2, and a HCDR3 as set forth for MIAB49 in Table 9. In some embodiments, the variable heavy chain has a HCDR1, HCDR2, and a HCDR3 as set forth for MIAB50 in Table 9. In some embodiments, the variable heavy chain has a HCDR1, HCDR2, and a HCDR3 as set forth for MIAB51 in Table 9. In some embodiments, the variable heavy chain has a HCDR1, HCDR2, and a HCDR3 as set forth for MIAB52 in Table 9. In some embodiments, the variable heavy chain has a HCDR1, HCDR2, and a HCDR3 as set forth for MIAB53 in Table 9. In some embodiments, the variable heavy chain has a HCDR1, HCDR2, and a HCDR3 as set forth for MIAB54 in Table 9. In some embodiments, the variable heavy chain has a HCDR1, HCDR2, and a HCDR3 as set forth for MIAB55 in Table 9. In some embodiments, the variable heavy chain has a HCDR1, HCDR2, and a HCDR3 as set forth for MIAB56 in Table 9. In some embodiments, the variable heavy chain has a HCDR1, HCDR2, and a HCDR3 as set forth for MIAB57 in Table 9. In some embodiments, the variable heavy chain has a HCDR1, HCDR2, and a HCDR3 as set forth for MIAB58 in Table 9. In some embodiments, the variable heavy chain has a HCDR1, HCDR2, and a HCDR3 as set forth for MIAB59 in Table 9. In some embodiments, the variable heavy chain has a HCDR1, HCDR2, and a HCDR3 as set forth for MIAB60 in Table 9. In some embodiments, the variable heavy chain has a HCDR1, HCDR2, and a HCDR3 as set forth for MIAB61 in Table 9. In some embodiments, the variable heavy chain has a HCDR1, HCDR2, and a HCDR3 as set forth for MIAB62 in Table 9. In some embodiments, the variable heavy chain has a HCDR1, HCDR2, and a HCDR3 as set forth for MIAB63 in Table 9. In some embodiments, the variable heavy chain has a HCDR1, HCDR2, and a HCDR3 as set forth for MIAB64 in Table 9. In some embodiments, the variable heavy chain has a HCDR1, HCDR2, and a HCDR3 as set forth for MIAB65 in Table 9. In some embodiments, the variable heavy chain has a HCDR1, HCDR2, and a HCDR3 as set forth for MIAB66 in Table 9. In some embodiments, the variable heavy chain has a HCDR1, HCDR2, and a HCDR3 as set forth for MIAB67 in Table 9. In some embodiments, the variable heavy chain has a HCDR1, HCDR2, and a HCDR3 as set forth for MIAB68 in Table 9. In some embodiments, the variable heavy chain has a HCDR1, HCDR2, and a HCDR3 as set forth for MIAB69 in Table 9. In some embodiments, the variable heavy chain has a HCDR1, HCDR2, and a HCDR3 as set forth for MIAB70 in Table 9. In some embodiments, the variable heavy chain has a HCDR1, HCDR2, and a HCDR3 as set forth for MIAB71 in Table 9. In some embodiments, the variable heavy chain has a HCDR1, HCDR2, and a HCDR3 as set forth for MIAB72 in Table 9. In some embodiments, the variable heavy chain has a HCDR1, HCDR2, and a HCDR3 as set forth for MIAB73 in Table 9. In some embodiments, the variable heavy chain has a HCDR1, HCDR2, and a HCDR3 as set forth for MIAB74 in Table 9. In some embodiments, the variable heavy chain has a HCDR1, HCDR2, and a HCDR3 as set forth for MIAB75 in Table 9. In some embodiments, the variable heavy chain has a HCDR1, HCDR2, and a HCDR3 as set forth for MIAB76 in Table 9. In some embodiments, the variable heavy chain has a HCDR1, HCDR2, and a HCDR3 as set forth for MIAB77 in Table 9. In some embodiments, the variable heavy chain has a HCDR1, HCDR2, and a HCDR3 as set forth for MIAB78 in Table 9. In some embodiments, the variable heavy chain has a HCDR1, HCDR2, and a HCDR3 as set forth for MIAB79 in Table 9. In some embodiments, the variable heavy chain has a HCDR1, HCDR2, and a HCDR3 as set forth for MIAB80 in Table 9. In some embodiments, the variable heavy chain has a HCDR1, HCDR2, and a HCDR3 as set forth for MIAB81 in Table 9. In some embodiments, the variable heavy chain has a HCDR1, HCDR2, and a HCDR3 as set forth for MIAB82 in Table 9. In some embodiments, the variable heavy chain has a HCDR1, HCDR2, and a HCDR3 as set forth for MIAB83 in Table 9. In some embodiments, the variable heavy chain has a HCDR1, HCDR2, and a HCDR3 as set forth for MIAB84 in Table 9. In some embodiments, the variable heavy chain has a HCDR1, HCDR2, and a HCDR3 as set forth for MIAB85 in Table 9. In some embodiments, the variable heavy chain has a HCDR1, HCDR2, and a HCDR3 as set forth for MIAB86 in Table 9. In some embodiments, the variable heavy chain has a HCDR1, HCDR2, and a HCDR3 as set forth for MIAB87 in Table 9. In some embodiments, the variable heavy chain has a HCDR1, HCDR2, and a HCDR3 as set forth for MIAB88 in Table 9. In some embodiments, the variable heavy chain has a HCDR1, HCDR2, and a HCDR3 as set forth for MIAB89 in Table 9. In some embodiments, the variable heavy chain has a HCDR1, HCDR2, and a HCDR3 as set forth for MIAB90 in Table 9. In some embodiments, the variable heavy chain has a HCDR1, HCDR2, and a HCDR3 as set forth for MIAB91 in Table 9. In some embodiments, the variable heavy chain has a HCDR1, HCDR2, and a HCDR3 as set forth for MIAB92 in Table 9. In some embodiments, the variable heavy chain has a HCDR1, HCDR2, and a HCDR3 as set forth for MIAB93 in Table 9. In some embodiments, the variable heavy chain has a HCDR1, HCDR2, and a HCDR3 as set forth for MIAB94 in Table 9. In some embodiments, the variable heavy chain has a HCDR1, HCDR2, and a HCDR3 as set forth for MIAB95 in Table 9. In some embodiments, the variable heavy chain has a HCDR1, HCDR2, and a HCDR3 as set forth for MIAB96 in Table 9. In some embodiments, the variable heavy chain has a HCDR1, HCDR2, and a HCDR3 as set forth for MIAB97 in Table 9. In some embodiments, the variable heavy chain has a HCDR1, HCDR2, and a HCDR3 as set forth for MIAB98 in Table 9. In some embodiments, the variable heavy chain has a HCDR1, HCDR2, and a HCDR3 as set forth for MIAB99 in Table 9. In some embodiments, the variable heavy chain has a HCDR1, HCDR2, and a HCDR3 as set forth for MIAB100 in Table 9. In some embodiments, the variable heavy chain has a HCDR1, HCDR2, and a HCDR3 as set forth for MIAB101 in Table 9. In some embodiments, the variable heavy chain has a HCDR1, HCDR2, and a HCDR3 as set forth for MIAB102 in Table 9. In some embodiments, the variable heavy chain has a HCDR1, HCDR2, and a HCDR3 as set forth for MIAB103 in Table 9. In some embodiments, the variable heavy chain has a HCDR1, HCDR2, and a HCDR3 as set forth for MIAB104 in Table 9. In some embodiments, the variable heavy chain has a HCDR1, HCDR2, and a HCDR3 as set forth for MIAB105 in Table 9. In some embodiments, the variable heavy chain has a HCDR1, HCDR2, and a HCDR3 as set forth for MIAB106 in Table 9. In some embodiments, the variable heavy chain has a HCDR1, HCDR2, and a HCDR3 as set forth for MIAB107 in Table 9. In some embodiments, the variable heavy chain has a HCDR1, HCDR2, and a HCDR3 as set forth for MIAB108 in Table 9. In some embodiments, the variable heavy chain has a HCDR1, HCDR2, and a HCDR3 as set forth for MIAB109 in Table 9. In some embodiments, the variable heavy chain has a HCDR1, HCDR2, and a HCDR3 as set forth for MIAB110 in Table 9. In some embodiments, the variable heavy chain has a HCDR1, HCDR2, and a HCDR3 as set forth for MIAB111 in Table 9. In some embodiments, the variable heavy chain has a HCDR1, HCDR2, and a HCDR3 as set forth for MIAB112 in Table 9. In some embodiments, the variable heavy chain has a HCDR1, HCDR2, and a HCDR3 as set forth for MIAB113 in Table 9. In some embodiments, the variable heavy chain has a HCDR1, HCDR2, and a HCDR3 as set forth for MIAB114 in Table 9. In some embodiments, the variable heavy chain has a HCDR1, HCDR2, and a HCDR3 as set forth for MIAB115 in Table 9. In some embodiments, the variable heavy chain has a HCDR1, HCDR2, and a HCDR3 as set forth for MIAB116 in Table 9. In some embodiments, the variable heavy chain has a HCDR1, HCDR2, and a HCDR3 as set forth for MIAB117 in Table 9. In some embodiments, the variable heavy chain has a HCDR1, HCDR2, and a HCDR3 as set forth for MIAB118 in Table 9. In some embodiments, the variable heavy chain has a HCDR1, HCDR2, and a HCDR3 as set forth for MIAB119 in Table 9. In some embodiments, the variable heavy chain has a HCDR1, HCDR2, and a HCDR3 as set forth for MIAB120 in Table 9. In some embodiments, the variable heavy chain has a HCDR1, HCDR2, and a HCDR3 as set forth for MIAB121 in Table 9. In some embodiments, the variable heavy chain has a HCDR1, HCDR2, and a HCDR3 as set forth for MIAB122 in Table 9. In some embodiments, the variable heavy chain has a HCDR1, HCDR2, and a HCDR3 as set forth for MIAB123 in Table 9. In some embodiments, the variable heavy chain has a HCDR1, HCDR2, and a HCDR3 as set forth for MIAB124 in Table 9. In some embodiments, the variable heavy chain has a HCDR1, HCDR2, and a HCDR3 as set forth for MIAB125 in Table 9. In some embodiments, the variable heavy chain has a HCDR1, HCDR2, and a HCDR3 as set forth for MIAB126 in Table 9. In some embodiments, the variable heavy chain has a HCDR1, HCDR2, and a HCDR3 as set forth for MIAB127 in Table 9. In some embodiments, the variable heavy chain has a HCDR1, HCDR2, and a HCDR3 as set forth for MIAB128 in Table 9. In some embodiments, the variable heavy chain has a HCDR1, HCDR2, and a HCDR3 as set forth for MIAB128A in Table 9. In some embodiments, the variable heavy chain has a HCDR1, HCDR2, and a HCDR3 as set forth for MIAB129 in Table 9. In some embodiments, the variable heavy chain has a HCDR1, HCDR2, and a HCDR3 as set forth for MIAB130 in Table 9. In some embodiments, the variable heavy chain has a HCDR1, HCDR2, and a HCDR3 as set forth for MIAB131 in Table 9. In some embodiments, the variable heavy chain has a HCDR1, HCDR2, and a HCDR3 as set forth for MIAB132 in Table 9. In some embodiments, the variable heavy chain has a HCDR1, HCDR2, and a HCDR3 as set forth for MIAB133 in Table 9. In some embodiments, the variable heavy chain has a HCDR1, HCDR2, and a HCDR3 as set forth for MIAB134 in Table 9. In some embodiments, the variable heavy chain has a HCDR1, HCDR2, and a HCDR3 as set forth for MIAB135 in Table 9. In some embodiments, the variable heavy chain has a HCDR1, HCDR2, and a HCDR3 as set forth for MIAB136 in Table 9. In some embodiments, the variable heavy chain has a HCDR1, HCDR2, and a HCDR3 as set forth for MIAB137 in Table 9. In some embodiments, the variable heavy chain has a HCDR1, HCDR2, and a HCDR3 as set forth for MIAB138 in Table 9. In some embodiments, the variable heavy chain has a HCDR1, HCDR2, and a HCDR3 as set forth for MIAB139 in Table 9. In some embodiments, the variable heavy chain has a HCDR1, HCDR2, and a HCDR3 as set forth for MIAB140 in Table 9. In some embodiments, the variable heavy chain has a HCDR1, HCDR2, and a HCDR3 as set forth for MIAB141 in Table 9. In some embodiments, the variable heavy chain has a HCDR1, HCDR2, and a HCDR3 as set forth for MIAB142 in Table 9. In some embodiments, the variable heavy chain has a HCDR1, HCDR2, and a HCDR3 as set forth for MIAB143 in Table 9. In some embodiments, the variable heavy chain has a HCDR1, HCDR2, and a HCDR3 as set forth for MIAB144 in Table 9. In some embodiments, the variable heavy chain has a HCDR1, HCDR2, and a HCDR3 as set forth for MIAB145 in Table 9. In some embodiments, the variable heavy chain has a HCDR1, HCDR2, and a HCDR3 as set forth for MIAB146 in Table 9. In some embodiments, the variable heavy chain has a HCDR1, HCDR2, and a HCDR3 as set forth for MIAB147 in Table 9. In some embodiments, the variable heavy chain has a HCDR1, HCDR2, and a HCDR3 as set forth for MIAB148 in Table 9. In some embodiments, the variable heavy chain has a HCDR1, HCDR2, and a HCDR3 as set forth for MIAB149 in Table 9. In some embodiments, the variable heavy chain has a HCDR1, HCDR2, and a HCDR3 as set forth for MIAB150 in Table 9. In some embodiments, the variable heavy chain has a HCDR1, HCDR2, and a HCDR3 as set forth for MIAB151 in Table 9. In some embodiments, the variable heavy chain has a HCDR1, HCDR2, and a HCDR3 as set forth for MIAB152 in Table 9. In some embodiments, the variable heavy chain has a HCDR1, HCDR2, and a HCDR3 as set forth for MIAB153 in Table 9. In some embodiments, the variable heavy chain has a HCDR1, HCDR2, and a HCDR3 as set forth for MIAB154 in Table 9. In some embodiments, the variable heavy chain has a HCDR1, HCDR2, and a HCDR3 as set forth for MIAB155 in Table 9. In some embodiments, the variable heavy chain has a HCDR1, HCDR2, and a HCDR3 as set forth for MIAB156 in Table 9. In some embodiments, the variable heavy chain has a HCDR1, HCDR2, and a HCDR3 as set forth for MIAB157 in Table 9. In some embodiments, the variable heavy chain has a HCDR1, HCDR2, and a HCDR3 as set forth for MIAB158 in Table 9. In some embodiments, the variable heavy chain has a HCDR1, HCDR2, and a HCDR3 as set forth for MIAB159 in Table 9. In some embodiments, the variable heavy chain has a HCDR1, HCDR2, and a HCDR3 as set forth for MIAB160 in Table 9. In some embodiments, the variable heavy chain has a HCDR1, HCDR2, and a HCDR3 as set forth for MIAB161 in Table 9. In some embodiments, the variable heavy chain has a HCDR1, HCDR2, and a HCDR3 as set forth for MIAB162 in Table 9. In some embodiments, the variable heavy chain has a HCDR1, HCDR2, and a HCDR3 as set forth for MIAB163 in Table 9. In some embodiments, the variable heavy chain has a HCDR1, HCDR2, and a HCDR3 as set forth for MIAB164 in Table 9. In some embodiments, the variable heavy chain has a HCDR1, HCDR2, and a HCDR3 as set forth for MIAB165 in Table 9. In some embodiments, the variable heavy chain has a HCDR1, HCDR2, and a HCDR3 as set forth for MIAB166 in Table 9. In some embodiments, the variable heavy chain has a HCDR1, HCDR2, and a HCDR3 as set forth for MIAB167 in Table 9. In some embodiments, the variable heavy chain has a HCDR1, HCDR2, and a HCDR3 as set forth for MIAB168 in Table 9. In some embodiments, the variable heavy chain has a HCDR1, HCDR2, and a HCDR3 as set forth for MIAB169 in Table 9. In some embodiments, the variable heavy chain has a HCDR1, HCDR2, and a HCDR3 as set forth for MIAB170 in Table 9. In some embodiments, the variable heavy chain has a HCDR1, HCDR2, and a HCDR3 as set forth for MIAB171 in Table 9. In some embodiments, the variable heavy chain has a HCDR1, HCDR2, and a HCDR3 as set forth for MIAB172 in Table 9. In some embodiments, the variable heavy chain has a HCDR1, HCDR2, and a HCDR3 as set forth for MIAB173 in Table 9. In some embodiments, the variable heavy chain has a HCDR1, HCDR2, and a HCDR3 as set forth for MIAB174 in Table 9. In some embodiments, the variable heavy chain has a HCDR1, HCDR2, and a HCDR3 as set forth for MIAB175 in Table 9. In some embodiments, the variable heavy chain has a HCDR1, HCDR2, and a HCDR3 as set forth for MIAB176 in Table 9. In some embodiments, the variable heavy chain has a HCDR1, HCDR2, and a HCDR3 as set forth for MIAB177 in Table 9. In some embodiments, the variable heavy chain has a HCDR1, HCDR2, and a HCDR3 as set forth for MIAB178 in Table 9. In some embodiments, the variable heavy chain has a HCDR1, HCDR2, and a HCDR3 as set forth for MIAB179 in Table 9. In some embodiments, the variable heavy chain has a HCDR1, HCDR2, and a HCDR3 as set forth for MIAB180 in Table 9. In some embodiments, the variable heavy chain has a HCDR1, HCDR2, and a HCDR3 as set forth for MIAB181 in Table 9. In some embodiments, the variable heavy chain has a HCDR1, HCDR2, and a HCDR3 as set forth for MIAB182 in Table 9. In some embodiments, the variable heavy chain has a HCDR1, HCDR2, and a HCDR3 as set forth for MIAB183 in Table 9. In some embodiments, the variable heavy chain has a HCDR1, HCDR2, and a HCDR3 as set forth for MIAB184 in Table 9. In some embodiments, the variable heavy chain has a HCDR1, HCDR2, and a HCDR3 as set forth for MIAB185 in Table 9. In some embodiments, the variable heavy chain has a HCDR1, HCDR2, and a HCDR3 as set forth for MIAB186 in Table 9. In some embodiments, the variable heavy chain has a HCDR1, HCDR2, and a HCDR3 as set forth for MIAB187 in Table 9. In some embodiments, the variable heavy chain has a HCDR1, HCDR2, and a HCDR3 as set forth for MIAB188 in Table 9. In some embodiments, the variable heavy chain has a HCDR1, HCDR2, and a HCDR3 as set forth for MIAB189 in Table 9. In some embodiments, the variable heavy chain has a HCDR1, HCDR2, and a HCDR3 as set forth for MIAB190 in Table 9. In some embodiments, the variable heavy chain has a HCDR1, HCDR2, and a HCDR3 as set forth for MIAB191 in Table 9. In some embodiments, the variable heavy chain has a HCDR1, HCDR2, and a HCDR3 as set forth for MIAB192 in Table 9. In some embodiments, the variable heavy chain has a HCDR1, HCDR2, and a HCDR3 as set forth for MIAB193 in Table 9. In some embodiments, the variable heavy chain has a HCDR1, HCDR2, and a HCDR3 as set forth for MIAB194 in Table 9. In some embodiments, the variable heavy chain has a HCDR1, HCDR2, and a HCDR3 as set forth for MIAB195 in Table 9. In some embodiments, the variable heavy chain has a HCDR1, HCDR2, and a HCDR3 as set forth for MIAB196 in Table 9. In some embodiments, the variable heavy chain has a HCDR1, HCDR2, and a HCDR3 as set forth for MIAB197 in Table 9. In some embodiments, the variable heavy chain has a HCDR1, HCDR2, and a HCDR3 as set forth for MIAB198 in Table 9. In some embodiments, the variable heavy chain has a HCDR1, HCDR2, and a HCDR3 as set forth for MIAB205 in Table 9. In some embodiments, the variable heavy chain has a HCDR1, HCDR2, and a HCDR3 as set forth for MIAB206 in Table 9. In some embodiments, the variable heavy chain has a HCDR1, HCDR2, and a HCDR3 as set forth for MIAB207 in Table 9. In some embodiments, the variable heavy chain has a HCDR1, HCDR2, and a HCDR3 as set forth for MIAB208 in Table 9. In some embodiments, the variable heavy chain has a HCDR1, HCDR2, and a HCDR3 as set forth for MIAB209 in Table 9.

[0538] In some embodiments, the variable heavy chain has a HCDR1, HCDR2, and a HCDR3 as set forth for PMAB1 in Table 14. In some embodiments, the variable heavy chain has a HCDR1, HCDR2, and a HCDR3 as set forth for PMAB3 in Table 14. In some embodiments, the variable heavy chain has a HCDR1, HCDR2, and a HCDR3 as set forth for PMAB4 in Table 14. In some embodiments, the variable heavy chain has a HCDR1, HCDR2, and a HCDR3 as set forth for PMAB5 in Table 14. In some embodiments, the variable heavy chain has a HCDR1, HCDR2, and a HCDR3 as set forth for PMAB6 in Table 14. In some embodiments, the variable heavy chain has a HCDR1, HCDR2, and a HCDR3 as set forth for PMAB7 in Table 14. In some embodiments, the variable heavy chain has a HCDR1, HCDR2, and a HCDR3 as set forth for PMAB8 in Table 14. In some embodiments, the variable heavy chain has a HCDR1, HCDR2, and a HCDR3 as set forth for PMAB9 in Table 14. In some embodiments, the variable heavy chain has a HCDR1, HCDR2, and a HCDR3 as set forth for PMAB1 in Table 14. In some embodiments, the variable heavy chain has a HCDR1, HCDR2, and a HCDR3 as set forth for PMAB10 in Table 14. In some embodiments, the variable heavy chain has a HCDR1, HCDR2, and a HCDR3 as set forth for PMAB11 in Table 14. In some embodiments, the variable heavy chain has a HCDR1, HCDR2, and a HCDR3 as set forth for PMAB12 in Table 14. In some embodiments, the variable heavy chain has a HCDR1, HCDR2, and a HCDR3 as set forth for PMAB13 in Table 14. In some embodiments, the variable heavy chain has a HCDR1, HCDR2, and a HCDR3 as set forth for PMAB14 in Table 14. In some embodiments, the variable heavy chain has a HCDR1, HCDR2, and a HCDR3 as set forth for PMAB15 in Table 14. In some embodiments, the variable heavy chain has a HCDR1, HCDR2, and a HCDR3 as set forth for PMAB16 in Table 14. In some embodiments, the variable heavy chain has a HCDR1, HCDR2, and a HCDR3 as set forth for PMAB1 in Table 14. In some embodiments, the variable heavy chain has a HCDR1, HCDR2, and a HCDR3 as set forth for PMAB19 in Table 14. In some embodiments, the variable heavy chain has a HCDR1, HCDR2, and a HCDR3 as set forth for PMAB20 in Table 14. In some embodiments, the variable heavy chain has a HCDR1, HCDR2, and a HCDR3 as set forth for PMAB21 in Table 14. In some embodiments, the variable heavy chain has a HCDR1, HCDR2, and a HCDR3 as set forth for PMAB22 in Table 14. In some embodiments, the variable heavy chain has a HCDR1, HCDR2, and a HCDR3 as set forth for PMAB23 in Table 14. In some embodiments, the variable heavy chain has a HCDR1, HCDR2, and a HCDR3 as set forth for PMAB24 in Table 14. In some embodiments, the variable heavy chain has a HCDR1, HCDR2, and a HCDR3 as set forth for PMAB25 in Table 14. In some embodiments, the variable heavy chain has a HCDR1, HCDR2, and a HCDR3 as set forth for PMAB26 in Table 14. In some embodiments, the variable heavy chain has a HCDR1, HCDR2, and a HCDR3 as set forth for PMAB27 in Table 14. In some embodiments, the variable heavy chain has a HCDR1, HCDR2, and a HCDR3 as set forth for PMAB28 in Table 14. In some embodiments, the variable heavy chain has a HCDR1, HCDR2, and a HCDR3 as set forth for PMAB29 in Table 14. In some embodiments, the variable heavy chain has a HCDR1, HCDR2, and a HCDR3 as set forth for PMAB30 in Table 14. In some embodiments, the variable heavy chain has a HCDR1, HCDR2, and a HCDR3 as set forth for PMAB31 in Table 14. In some embodiments, the variable heavy chain has a HCDR1, HCDR2, and a HCDR3 as set forth for PMAB32 in Table 14. In some embodiments, the variable heavy chain has a HCDR1, HCDR2, and a HCDR33 as set forth for PMAB33 in Table 14. In some embodiments, the variable heavy chain has a HCDR1, HCDR2, and a HCDR3 as set forth for PMAB34 in Table 14. In some embodiments, the variable heavy chain has a HCDR1, HCDR2, and a HCDR3 as set forth for PMAB35 in Table 14. In some embodiments, the variable heavy chain has a HCDR1, HCDR2, and a HCDR3 as set forth for PMAB36 in Table 14. In some embodiments, the variable heavy chain has a HCDR1, HCDR2, and a HCDR3 as set forth for PMAB37 in Table 14. In some embodiments, the variable heavy chain has a HCDR1, HCDR2, and a HCDR3 as set forth for PMAB38 in Table 14. In some embodiments, the variable heavy chain has a HCDR1, HCDR2, and a HCDR3 as set forth for PMAB39 in Table 14. In some embodiments, the variable heavy chain has a HCDR1, HCDR2, and a HCDR3 as set forth for PMAB40 in Table 14. In some embodiments, the variable heavy chain has a HCDR1, HCDR2, and a HCDR3 as set forth for PMAB41 in Table 14. In some embodiments, the variable heavy chain has a HCDR1, HCDR2, and a HCDR3 as set forth for PMAB42 in Table 14. In some embodiments, the variable heavy chain has a HCDR1, HCDR2, and a HCDR3 as set forth for PMAB43 in Table 14. In some embodiments, the variable heavy chain has a HCDR1, HCDR2, and a HCDR3 as set forth for PMAB44 in Table 14. In some embodiments, the variable heavy chain has a HCDR1, HCDR2, and a HCDR3 as set forth for PMAB45 in Table 14. In some embodiments, the variable heavy chain has a HCDR1, HCDR2, and a HCDR3 as set forth for PMAB46 in Table 14. In some embodiments, the variable heavy chain has a HCDR1, HCDR2, and a HCDR3 as set forth for PMAB47 in Table 14. In some embodiments, the variable heavy chain has a HCDR1, HCDR2, and a HCDR3 as set forth for PMAB48 in Table 14. In some embodiments, the variable heavy chain has a HCDR1, HCDR2, and a HCDR3 as set forth for PMAB49 in Table 14. In some embodiments, the variable heavy chain has a HCDR1, HCDR2, and a HCDR3 as set forth for PMAB50 in Table 14. In some embodiments, the variable heavy chain has a HCDR1, HCDR2, and a HCDR3 as set forth for PMAB51 in Table 14. In some embodiments, the variable heavy chain has a HCDR1, HCDR2, and a HCDR3 as set forth for PMAB52 in Table 14. In some embodiments, the variable heavy chain has a HCDR1, HCDR2, and a HCDR3 as set forth for PMAB53 in Table 14. In some embodiments, the variable heavy chain has a HCDR1, HCDR2, and a HCDR3 as set forth for PMAB55 in Table 14.

[0539] In some embodiments, the variable heavy chain has a HCDR1, HCDR2, and a HCDR3 as set forth for MIAB212 in Table 15. In some embodiments, the variable heavy chain has a HCDR1, HCDR2, and a HCDR3 as set forth for MIAB213 in Table 15. In some embodiments, the variable heavy chain has a HCDR1, HCDR2, and a HCDR3 as set forth for MIAB214 in Table 15.

[0540] In some embodiments, the variable light chain has a LCDR1, LCDR2, and a LCDR3 as set forth for Clone 1 in Table 6. In some embodiments, the variable heavy chain has a LCDR1, LCDR2, and a LCDR3 as set forth for Clone 2 in Table 6. In some embodiments, the variable heavy chain has a LCDR1, LCDR2, and a LCDR3 as set forth for Clone 3 in Table 6. In some embodiments, the variable heavy chain has a LCDR1, LCDR2, and a LCDR3 as set forth for Clone 4 in Table 6. In some embodiments, the variable heavy chain has a LCDR1, LCDR2, and a LCDR3 as set forth for Clone 5 in Table 6. In some embodiments, the variable heavy chain has a LCDR1, LCDR2, and a LCDR3 as set forth for Clone 6 in Table 6. In some embodiments, the variable heavy chain has a LCDR1, LCDR2, and a LCDR3 as set forth for Clone 7 in Table 6. In some embodiments, the variable heavy chain has a LCDR1, LCDR2, and a LCDR3 as set forth for Clone 8 in Table 6. In some embodiments, the variable heavy chain has a LCDR1, LCDR2, and a LCDR3 as set forth for Clone 9 in Table 6. In some embodiments, the variable heavy chain has a LCDR1, LCDR2, and a LCDR3 as set forth for Clone 10 in Table 6. In some embodiments, the variable heavy chain has a LCDR1, LCDR2, and a LCDR3 as set forth for Clone 11 in Table 6. In some embodiments, the variable heavy chain has a LCDR1, LCDR2, and a LCDR3 as set forth for Clone 12 in Table 6. In some embodiments, the variable heavy chain has a LCDR1, LCDR2, and a LCDR3 as set forth for Clone 13 in Table 6. In some embodiments, the variable heavy chain has a LCDR1, LCDR2, and a LCDR3 as set forth for Clone 14 in Table 6. In some embodiments, the variable heavy chain has a LCDR1, LCDR2, and a LCDR3 as set forth for Clone 15 in Table 6. In some embodiments, the variable heavy chain has a LCDR1, LCDR2, and a LCDR3 as set forth for Clone 16 in Table 6. In some embodiments, the variable heavy chain has a LCDR1, LCDR2, and a LCDR3 as set forth for Clone 17 in Table 6. In some embodiments, the variable heavy chain has a LCDR1, LCDR2, and a LCDR3 as set forth for Clone 1 in Table 6. In some embodiments, the variable heavy chain has a LCDR1, LCDR2, and a LCDR3 as set forth for Clone 18 in Table 6. In some embodiments, the variable heavy chain has a LCDR1, LCDR2, and a LCDR3 as set forth for Clone 19 in Table 6. In some embodiments, the variable heavy chain has a LCDR1, LCDR2, and a LCDR3 as set forth for Clone 20 in Table 6. In some embodiments, the variable heavy chain has a LCDR1, LCDR2, and a LCDR3 as set forth for Clone 21 in Table 6. In some embodiments, the variable heavy chain has a LCDR1, LCDR2, and a LCDR3 as set forth for Clone 22 in Table 6. In some embodiments, the variable heavy chain has a LCDR1, LCDR2, and a LCDR3 as set forth for Clone 23 in Table 6. In some embodiments, the variable heavy chain has a LCDR1, LCDR2, and a LCDR3 as set forth for Clone 24 in Table 6. In some embodiments, the variable heavy chain has a LCDR1, LCDR2, and a LCDR3 as set forth for Clone 25 in Table 6. In some embodiments, the variable heavy chain has a LCDR1, LCDR2, and a LCDR3 as set forth for Clone 26 in Table 6. In some embodiments, the variable heavy chain has a LCDR1, LCDR2, and a LCDR3 as set forth for Clone 27 in Table 6. In some embodiments, the variable heavy chain has a LCDR1, LCDR2, and a LCDR3 as set forth for Clone 28 in Table 6. In some embodiments, the variable heavy chain has a LCDR1, LCDR2, and a LCDR3 as set forth for Clone 29 in Table 6. In some embodiments, the variable heavy chain has a LCDR1, LCDR2, and a LCDR3 as set forth for Clone 30 in Table 6. In some embodiments, the variable heavy chain has a LCDR1, LCDR2, and a LCDR3 as set forth for Clone 31 in Table 6. In some embodiments, the variable heavy chain has a LCDR1, LCDR2, and a LCDR3 as set forth for Clone 32 in Table 6. In some embodiments, the variable heavy chain has a LCDR1, LCDR2, and a LCDR3 as set forth for Clone 33 in Table 6. In some embodiments, the variable heavy chain has a LCDR1, LCDR2, and a LCDR3 as set forth for Clone 34 in Table 6. In some embodiments, the variable heavy chain has a LCDR1, LCDR2, and a LCDR3 as set forth for Clone 35 in Table 6. In some embodiments, the variable heavy chain has a LCDR1, LCDR2, and a LCDR3 as set forth for Clone 36 in Table 6. In some embodiments, the variable heavy chain has a LCDR1, LCDR2, and a LCDR3 as set forth for Clone 37 in Table 6. In some embodiments, the variable heavy chain has a LCDR1, LCDR2, and a LCDR3 as set forth for Clone 38 in Table 6. In some embodiments, the variable heavy chain has a LCDR1, LCDR2, and a LCDR3 as set forth for Clone 39 in Table 6. In some embodiments, the variable heavy chain has a LCDR1, LCDR2, and a LCDR3 as set forth for Clone 40 in Table 6. In some embodiments, the variable heavy chain has a LCDR1, LCDR2, and a LCDR3 as set forth for Clone 41 in Table 6. In some embodiments, the variable heavy chain has a LCDR1, LCDR2, and a LCDR3 as set forth for Clone 42 in Table 6. In some embodiments, the variable heavy chain has a LCDR1, LCDR2, and a LCDR3 as set forth for Clone 43 in Table 6. In some embodiments, the variable heavy chain has a LCDR1, LCDR2, and a LCDR3 as set forth for Clone 44 in Table 6. In some embodiments, the variable heavy chain has a LCDR1, LCDR2, and a LCDR3 as set forth for Clone 45 in Table 6. In some embodiments, the variable heavy chain has a LCDR1, LCDR2, and a LCDR3 as set forth for Clone 46 in Table 6. In some embodiments, the variable heavy chain has a LCDR1, LCDR2, and a LCDR3 as set forth for Clone 47 in Table 6. In some embodiments, the variable heavy chain has a LCDR1, LCDR2, and a LCDR3 as set forth for Clone 48 in Table 6. In some embodiments, the variable heavy chain has a LCDR1, LCDR2, and a LCDR3 as set forth for Clone 49 in Table 6. In some embodiments, the variable heavy chain has a LCDR1, LCDR2, and a LCDR3 as set forth for Clone 50 in Table 6. In some embodiments, the variable heavy chain has a LCDR1, LCDR2, and a LCDR3 as set forth for Clone 51 in Table 6. In some embodiments, the variable heavy chain has a LCDR1, LCDR2, and a LCDR3 as set forth for Clone 52 in Table 6. In some embodiments, the variable heavy chain has a LCDR1, LCDR2, and a LCDR3 as set forth for Clone 53 in Table 6. In some embodiments, the variable heavy chain has a LCDR1, LCDR2, and a LCDR3 as set forth for Clone 54 in Table 6. In some embodiments, the variable heavy chain has a LCDR1, LCDR2, and a LCDR3 as set forth for Clone 55 in Table 6. In some embodiments, the variable heavy chain has a LCDR1, LCDR2, and a LCDR3 as set forth for Clone 56 in Table 6. In some embodiments, the variable heavy chain has a LCDR1, LCDR2, and a LCDR3 as set forth for Clone 57 in Table 6. In some embodiments, the variable heavy chain has a LCDR1, LCDR2, and a LCDR3 as set forth for Clone 58 in Table 6. In some embodiments, the variable heavy chain has a LCDR1, LCDR2, and a LCDR3 as set forth for Clone 59 in Table 6. In some embodiments, the variable heavy chain has a LCDR1, LCDR2, and a LCDR3 as set forth for Clone 60 in Table 6. In some embodiments, the variable heavy chain has a LCDR1, LCDR2, and a LCDR3 as set forth for Clone 61 in Table 6. In some embodiments, the variable heavy chain has a LCDR1, LCDR2, and a LCDR3 as set forth for Clone 62 in Table 6. In some embodiments, the variable heavy chain has a LCDR1, LCDR2, and a LCDR3 as set forth for Clone 63 in Table 6. In some embodiments, the variable heavy chain has a LCDR1, LCDR2, and a LCDR3 as set forth for Clone 64 in Table 6. In some embodiments, the variable heavy chain has a LCDR1, LCDR2, and a LCDR3 as set forth for Clone 65 in Table 6. In some embodiments, the variable heavy chain has a LCDR1, LCDR2, and a LCDR3 as set forth for Clone 66 in Table 6.

[0541] In some embodiments, the variable heavy chain has a LCDR1, LCDR2, and a LCDR3 as set forth for Clone 1 in Table 7. In some embodiments, the variable heavy chain has a LCDR1, LCDR2, and a LCDR3 as set forth for Clone 2 in Table 7. In some embodiments, the variable heavy chain has a LCDR1, LCDR2, and a LCDR3 as set forth for Clone 3 in Table 7. In some embodiments, the variable heavy chain has a LCDR1, LCDR2, and a LCDR3 as set forth for Clone 4 in Table 7. In some embodiments, the variable heavy chain has a LCDR1, LCDR2, and a LCDR3 as set forth for Clone 5 in Table 7. In some embodiments, the variable heavy chain has a LCDR1, LCDR2, and a LCDR3 as set forth for Clone 6 in Table 7. In some embodiments, the variable heavy chain has a LCDR1, LCDR2, and a LCDR3 as set forth for Clone 7 in Table 7. In some embodiments, the variable heavy chain has a LCDR1, LCDR2, and a LCDR3 as set forth for Clone 8 in Table 7. In some embodiments, the variable heavy chain has a LCDR1, LCDR2, and a LCDR3 as set forth for Clone 9 in Table 7. In some embodiments, the variable heavy chain has a LCDR1, LCDR2, and a LCDR3 as set forth for Clone 10 in Table 7. In some embodiments, the variable heavy chain has a LCDR1, LCDR2, and a LCDR3 as set forth for Clone 11 in Table 7. In some embodiments, the variable heavy chain has a LCDR1, LCDR2, and a LCDR3 as set forth for Clone 12 in Table 7. In some embodiments, the variable heavy chain has a LCDR1, LCDR2, and a LCDR3 as set forth for Clone 13 in Table 7. In some embodiments, the variable heavy chain has a LCDR1, LCDR2, and a LCDR3 as set forth for Clone 14 in Table 7. In some embodiments, the variable heavy chain has a LCDR1, LCDR2, and a LCDR3 as set forth for Clone 15 in Table 7. In some embodiments, the variable heavy chain has a LCDR1, LCDR2, and a LCDR3 as set forth for Clone 16 in Table 7. In some embodiments, the variable heavy chain has a LCDR1, LCDR2, and a LCDR3 as set forth for Clone 17 in Table 7. In some embodiments, the variable heavy chain has a LCDR1, LCDR2, and a LCDR3 as set forth for Clone 1 in Table 7. In some embodiments, the variable heavy chain has a LCDR1, LCDR2, and a LCDR3 as set forth for Clone 18 in Table 7. In some embodiments, the variable heavy chain has a LCDR1, LCDR2, and a LCDR3 as set forth for Clone 19 in Table 7. In some embodiments, the variable heavy chain has a LCDR1, LCDR2, and a LCDR3 as set forth for Clone 20 in Table 7. In some embodiments, the variable heavy chain has a LCDR1, LCDR2, and a LCDR3 as set forth for Clone 21 in Table 7. In some embodiments, the variable heavy chain has a LCDR1, LCDR2, and a LCDR3 as set forth for Clone 22 in Table 7. In some embodiments, the variable heavy chain has a LCDR1, LCDR2, and a LCDR3 as set forth for Clone 23 in Table 7. In some embodiments, the variable heavy chain has a LCDR1, LCDR2, and a LCDR3 as set forth for Clone 24 in Table 7. In some embodiments, the variable heavy chain has a LCDR1, LCDR2, and a LCDR3 as set forth for Clone 25 in Table 7. In some embodiments, the variable heavy chain has a LCDR1, LCDR2, and a LCDR3 as set forth for Clone 26 in Table 7. In some embodiments, the variable heavy chain has a LCDR1, LCDR2, and a LCDR3 as set forth for Clone 27 in Table 7. In some embodiments, the variable heavy chain has a LCDR1, LCDR2, and a LCDR3 as set forth for Clone 28 in Table 7. In some embodiments, the variable heavy chain has a LCDR1, LCDR2, and a LCDR3 as set forth for Clone 29 in Table 7. In some embodiments, the variable heavy chain has a LCDR1, LCDR2, and a LCDR3 as set forth for Clone 30 in Table 7. In some embodiments, the variable heavy chain has a LCDR1, LCDR2, and a LCDR3 as set forth for Clone 31 in Table 7. In some embodiments, the variable heavy chain has a LCDR1, LCDR2, and a LCDR3 as set forth for Clone 32 in Table 7. In some embodiments, the variable heavy chain has a LCDR1, LCDR2, and a LCDR3 as set forth for Clone 33 in Table 7. In some embodiments, the variable heavy chain has a LCDR1, LCDR2, and a LCDR3 as set forth for Clone 34 in Table 7. In some embodiments, the variable heavy chain has a LCDR1, LCDR2, and a LCDR3 as set forth for Clone 35 in Table 7. In some embodiments, the variable heavy chain has a LCDR1, LCDR2, and a LCDR3 as set forth for Clone 36 in Table 7. In some embodiments, the variable heavy chain has a LCDR1, LCDR2, and a LCDR3 as set forth for Clone 37 in Table 7. In some embodiments, the variable heavy chain has a LCDR1, LCDR2, and a LCDR3 as set forth for Clone 38 in Table 7. In some embodiments, the variable heavy chain has a LCDR1, LCDR2, and a LCDR3 as set forth for Clone 39 in Table 7. In some embodiments, the variable heavy chain has a LCDR1, LCDR2, and a LCDR3 as set forth for Clone 40 in Table 7. In some embodiments, the variable heavy chain has a LCDR1, LCDR2, and a LCDR3 as set forth for Clone 41 in Table 7. In some embodiments, the variable heavy chain has a LCDR1, LCDR2, and a LCDR3 as set forth for Clone 42 in Table 7. In some embodiments, the variable heavy chain has a LCDR1, LCDR2, and a LCDR3 as set forth for Clone 43 in Table 7. In some embodiments, the variable heavy chain has a LCDR1, LCDR2, and a LCDR3 as set forth for Clone 44 in Table 7. In some embodiments, the variable heavy chain has a LCDR1, LCDR2, and a LCDR3 as set forth for Clone 45 in Table 7. In some embodiments, the variable heavy chain has a LCDR1, LCDR2, and a LCDR3 as set forth for Clone 46 in Table 7. In some embodiments, the variable heavy chain has a LCDR1, LCDR2, and a LCDR3 as set forth for Clone 47 in Table 7. In some embodiments, the variable heavy chain has a LCDR1, LCDR2, and a LCDR3 as set forth for Clone 48 in Table 7. In some embodiments, the variable heavy chain has a LCDR1, LCDR2, and a LCDR3 as set forth for Clone 49 in Table 7. In some embodiments, the variable heavy chain has a LCDR1, LCDR2, and a LCDR3 as set forth for Clone 50 in Table 7. In some embodiments, the variable heavy chain has a LCDR1, LCDR2, and a LCDR3 as set forth for Clone 51 in Table 7. In some embodiments, the variable heavy chain has a LCDR1, LCDR2, and a LCDR3 as set forth for Clone 52 in Table 7. In some embodiments, the variable heavy chain has a LCDR1, LCDR2, and a LCDR3 as set forth for Clone 53 in Table 7. In some embodiments, the variable heavy chain has a LCDR1, LCDR2, and a LCDR3 as set forth for Clone 54 in Table 7. In some embodiments, the variable heavy chain has a LCDR1, LCDR2, and a LCDR3 as set forth for Clone 55 in Table 7. In some embodiments, the variable heavy chain has a LCDR1, LCDR2, and a LCDR3 as set forth for Clone 56 in Table 7. In some embodiments, the variable heavy chain has a LCDR1, LCDR2, and a LCDR3 as set forth for Clone 57 in Table 7. In some embodiments, the variable heavy chain has a LCDR1, LCDR2, and a LCDR3 as set forth for Clone 58 in Table 7. In some embodiments, the variable heavy chain has a LCDR1, LCDR2, and a LCDR3 as set forth for Clone 59 in Table 7. In some embodiments, the variable heavy chain has a LCDR1, LCDR2, and a LCDR3 as set forth for Clone 60 in Table 7. In some embodiments, the variable heavy chain has a LCDR1, LCDR2, and a LCDR3 as set forth for Clone 61 in Table 7. In some embodiments, the variable heavy chain has a LCDR1, LCDR2, and a LCDR3 as set forth for Clone 62 in Table 7. In some embodiments, the variable heavy chain has a LCDR1, LCDR2, and a LCDR3 as set forth for Clone 63 in Table 7. In some embodiments, the variable heavy chain has a LCDR1, LCDR2, and a LCDR3 as set forth for Clone 64 in Table 7. In some embodiments, the variable heavy chain has a LCDR1, LCDR2, and a LCDR3 as set forth for Clone 65 in Table 7. In some embodiments, the variable heavy chain has a LCDR1, LCDR2, and a LCDR3 as set forth for Clone 66 in Table 7. In some embodiments, the variable heavy chain has a LCDR1, LCDR2, and a LCDR3 as set forth for Clone 67 in Table 7. In some embodiments, the variable heavy chain has a LCDR1, LCDR2, and a LCDR3 as set forth for Clone 68 in Table 7. In some embodiments, the variable heavy chain has a LCDR1, LCDR2, and a LCDR3 as set forth for Clone 69 in Table 7. In some embodiments, the variable heavy chain has a LCDR1, LCDR2, and a LCDR3 as set forth for Clone 70 in Table 7. In some embodiments, the variable heavy chain has a LCDR1, LCDR2, and a LCDR3 as set forth for Clone 71 in Table 7. In some embodiments, the variable heavy chain has a LCDR1, LCDR2, and a LCDR3 as set forth for Clone 72 in Table 7. In some embodiments, the variable heavy chain has a LCDR1, LCDR2, and a LCDR3 as set forth for Clone 73 in Table 7. In some embodiments, the variable heavy chain has a LCDR1, LCDR2, and a LCDR3 as set forth for Clone 74 in Table 7. In some embodiments, the variable heavy chain has a LCDR1, LCDR2, and a LCDR3 as set forth for Clone 75 in Table 7. In some embodiments, the variable heavy chain has a LCDR1, LCDR2, and a LCDR3 as set forth for Clone 76 in Table 7. In some embodiments, the variable heavy chain has a LCDR1, LCDR2, and a LCDR3 as set forth for Clone 77 in Table 7. In some embodiments, the variable heavy chain has a LCDR1, LCDR2, and a LCDR3 as set forth for Clone 78 in Table 7. In some embodiments, the variable heavy chain has a LCDR1, LCDR2, and a LCDR3 as set forth for Clone 79 in Table 7. In some embodiments, the variable heavy chain has a LCDR1, LCDR2, and a LCDR3 as set forth for Clone 80 in Table 7. In some embodiments, the variable heavy chain has a LCDR1, LCDR2, and a LCDR3 as set forth for Clone 81 in Table 7. In some embodiments, the variable heavy chain has a LCDR1, LCDR2, and a LCDR3 as set forth for Clone 82 in Table 7. In some embodiments, the variable heavy chain has a LCDR1, LCDR2, and a LCDR3 as set forth for Clone 83 in Table 7. In some embodiments, the variable light chain has a LCDR1, LCDR2, and a LCDR3 as set forth for Clone 84 in Table 7.

[0542] In some embodiments, the variable light chain has a LCDR1, LCDR2, and a LCDR3 as set forth for MIAB1 in Table 9. In some embodiments, the variable light chain has a LCDR1, LCDR2, and a LCDR3 as set forth for MIAB2 in Table 9. In some embodiments, the variable light chain has a LCDR1, LCDR2, and a LCDR3 as set forth for MIAB3 in Table 9. In some embodiments, the variable light chain has a LCDR1, LCDR2, and a LCDR3 as set forth for MIAB4 in Table 9. In some embodiments, the variable heavy chain has a HCDR1, HCDR2, and a HCDR5 as set forth for MIAB1 in Table 9. In some embodiments, the variable light chain has a LCDR1, LCDR2, and a LCDR3 as set forth for MIAB6 in Table 9. In some embodiments, the variable light chain has a LCDR1, LCDR2, and a LCDR3 as set forth for MIAB7 in Table 9. In some embodiments, the variable light chain has a LCDR1, LCDR2, and a LCDR3 as set forth for MIAB8 in Table 9. In some embodiments, the variable light chain has a LCDR1, LCDR2, and a LCDR3 as set forth for MIAB9 in Table 9. In some embodiments, the variable light chain has a LCDR1, LCDR2, and a LCDR3 as set forth for MIAB10 in Table 9. In some embodiments, the variable light chain has a LCDR1, LCDR2, and a LCDR3 as set forth for MIAB11 in Table 9. In some embodiments, the variable light chain has a LCDR1, LCDR2, and a LCDR3 as set forth for MIAB12 in Table 9. In some embodiments, the variable light chain has a LCDR1, LCDR2, and a LCDR3 as set forth for MIAB13 in Table 9. In some embodiments, the variable light chain has a LCDR1, LCDR2, and a LCDR3 as set forth for MIAB14 in Table 9. In some embodiments, the variable light chain has a LCDR1, LCDR2, and a LCDR3 as set forth for MIAB15 in Table 9. In some embodiments, the variable light chain has a LCDR1, LCDR2, and a LCDR3 as set forth for MIAB16 in Table 9. In some embodiments, the variable light chain has a LCDR1, LCDR2, and a LCDR3 as set forth for MIAB17 in Table 9. In some embodiments, the variable light chain has a LCDR1, LCDR2, and a LCDR3 as set forth for MIAB18 in Table 9. In some embodiments, the variable light chain has a LCDR1, LCDR2, and a LCDR3 as set forth for MIAB19 in Table 9. In some embodiments, the variable light chain has a LCDR1, LCDR2, and a LCDR3 as set forth for MIAB20 in Table 9. In some embodiments, the variable light chain has a LCDR1, LCDR2, and a LCDR3 as set forth for MIAB21 in Table 9. In some embodiments, the variable light chain has a LCDR1, LCDR2, and a LCDR3 as set forth for MIAB22 in Table 9. In some embodiments, the variable light chain has a LCDR1, LCDR2, and a LCDR3 as set forth for MIAB23 in Table 9. In some embodiments, the variable light chain has a LCDR1, LCDR2, and a LCDR3 as set forth for MIAB24 in Table 9. In some embodiments, the variable light chain has a LCDR1, LCDR2, and a LCDR3 as set forth for MIAB25 in Table 9. In some embodiments, the variable light chain has a LCDR1, LCDR2, and a LCDR3 as set forth for MIAB26 in Table 9. In some embodiments, the variable light chain has a LCDR1, LCDR2, and a LCDR3 as set forth for MIAB27 in Table 9. In some embodiments, the variable light chain has a LCDR1, LCDR2, and a LCDR3 as set forth for MIAB28 in Table 9. In some embodiments, the variable light chain has a LCDR1, LCDR2, and a LCDR3 as set forth for MIAB29 in Table 9. In some embodiments, the variable light chain has a LCDR1, LCDR2, and a LCDR3 as set forth for MIAB30 in Table 9. In some embodiments, the variable light chain has a LCDR1, LCDR2, and a LCDR3 as set forth for MIAB31 in Table 9. In some embodiments, the variable light chain has a LCDR1, LCDR2, and a LCDR3 as set forth for MIAB32 in Table 9. In some embodiments, the variable light chain has a LCDR1, LCDR2, and a LCDR3 as set forth for MIAB33 in Table 9. In some embodiments, the variable light chain has a LCDR1, LCDR2, and a LCDR3 as set forth for MIAB34 in Table 9. In some embodiments, the variable light chain has a LCDR1, LCDR2, and a LCDR3 as set forth for MIAB35 in Table 9. In some embodiments, the variable light chain has a LCDR1, LCDR2, and a LCDR3 as set forth for MIAB36 in Table 9. In some embodiments, the variable light chain has a LCDR1, LCDR2, and a LCDR3 as set forth for MIAB37 in Table 9. In some embodiments, the variable light chain has a LCDR1, LCDR2, and a LCDR3 as set forth for MIAB38 in Table 9. In some embodiments, the variable light chain has a LCDR1, LCDR2, and a LCDR3 as set forth for MIAB39 in Table 9. In some embodiments, the variable light chain has a LCDR1, LCDR2, and a LCDR3 as set forth for MIAB40 in Table 9. In some embodiments, the variable light chain has a LCDR1, LCDR2, and a LCDR3 as set forth for MIAB41 in Table 9. In some embodiments, the variable light chain has a LCDR1, LCDR2, and a LCDR3 as set forth for MIAB42 in Table 9. In some embodiments, the variable light chain has a LCDR1, LCDR2, and a LCDR3 as set forth for MIAB43 in Table 9. In some embodiments, the variable light chain has a LCDR1, LCDR2, and a LCDR3 as set forth for MIAB44 in Table 9. In some embodiments, the variable light chain has a LCDR1, LCDR2, and a LCDR3 as set forth for MIAB45 in Table 9. In some embodiments, the variable light chain has a LCDR1, LCDR2, and a LCDR3 as set forth for MIAB46 in Table 9. In some embodiments, the variable light chain has a LCDR1, LCDR2, and a LCDR3 as set forth for MIAB47 in Table 9. In some embodiments, the variable light chain has a LCDR1, LCDR2, and a LCDR3 as set forth for MIAB48 in Table 9. In some embodiments, the variable light chain has a LCDR1, LCDR2, and a LCDR3 as set forth for MIAB49 in Table 9. In some embodiments, the variable light chain has a LCDR1, LCDR2, and a LCDR3 as set forth for MIAB50 in Table 9. In some embodiments, the variable light chain has a LCDR1, LCDR2, and a LCDR3 as set forth for MIAB51 in Table 9. In some embodiments, the variable light chain has a LCDR1, LCDR2, and a LCDR3 as set forth for MIAB52 in Table 9. In some embodiments, the variable light chain has a LCDR1, LCDR2, and a LCDR3 as set forth for MIAB53 in Table 9. In some embodiments, the variable light chain has a LCDR1, LCDR2, and a LCDR3 as set forth for MIAB54 in Table 9. In some embodiments, the variable light chain has a LCDR1, LCDR2, and a LCDR3 as set forth for MIAB55 in Table 9. In some embodiments, the variable light chain has a LCDR1, LCDR2, and a LCDR3 as set forth for MIAB56 in Table 9. In some embodiments, the variable light chain has a LCDR1, LCDR2, and a LCDR3 as set forth for MIAB57 in Table 9. In some embodiments, the variable light chain has a LCDR1, LCDR2, and a LCDR3 as set forth for MIAB58 in Table 9. In some embodiments, the variable light chain has a LCDR1, LCDR2, and a LCDR3 as set forth for MIAB59 in Table 9. In some embodiments, the variable light chain has a LCDR1, LCDR2, and a LCDR3 as set forth for MIAB60 in Table 9. In some embodiments, the variable light chain has a LCDR1, LCDR2, and a LCDR3 as set forth for MIAB61 in Table 9. In some embodiments, the variable light chain has a LCDR1, LCDR2, and a LCDR3 as set forth for MIAB62 in Table 9. In some embodiments, the variable light chain has a LCDR1, LCDR2, and a LCDR3 as set forth for MIAB63 in Table 9. In some embodiments, the variable light chain has a LCDR1, LCDR2, and a LCDR3 as set forth for MIAB64 in Table 9. In some embodiments, the variable light chain has a LCDR1, LCDR2, and a LCDR3 as set forth for MIAB65 in Table 9. In some embodiments, the variable light chain has a LCDR1, LCDR2, and a LCDR3 as set forth for MIAB66 in Table 9. In some embodiments, the variable light chain has a LCDR1, LCDR2, and a LCDR3 as set forth for MIAB67 in Table 9. In some embodiments, the variable light chain has a LCDR1, LCDR2, and a LCDR3 as set forth for MIAB68 in Table 9. In some embodiments, the variable light chain has a LCDR1, LCDR2, and a LCDR3 as set forth for MIAB69 in Table 9. In some embodiments, the variable light chain has a LCDR1, LCDR2, and a LCDR3 as set forth for MIAB70 in Table 9. In some embodiments, the variable light chain has a LCDR1, LCDR2, and a LCDR3 as set forth for MIAB71 in Table 9. In some embodiments, the variable light chain has a LCDR1, LCDR2, and a LCDR3 as set forth for MIAB72 in Table 9. In some embodiments, the variable light chain has a LCDR1, LCDR2, and a LCDR3 as set forth for MIAB73 in Table 9. In some embodiments, the variable light chain has a LCDR1, LCDR2, and a LCDR3 as set forth for MIAB74 in Table 9. In some embodiments, the variable light chain has a LCDR1, LCDR2, and a LCDR3 as set forth for MIAB75 in Table 9. In some embodiments, the variable light chain has a LCDR1, LCDR2, and a LCDR3 as set forth for MIAB76 in Table 9. In some embodiments, the variable light chain has a LCDR1, LCDR2, and a LCDR3 as set forth for MIAB77 in Table 9. In some embodiments, the variable light chain has a LCDR1, LCDR2, and a LCDR3 as set forth for MIAB78 in Table 9. In some embodiments, the variable light chain has a LCDR1, LCDR2, and a LCDR3 as set forth for MIAB79 in Table 9. In some embodiments, the variable light chain has a LCDR1, LCDR2, and a LCDR3 as set forth for MIAB80 in Table 9. In some embodiments, the variable light chain has a LCDR1, LCDR2, and a LCDR3 as set forth for MIAB81 in Table 9. In some embodiments, the variable light chain has a LCDR1, LCDR2, and a LCDR3 as set forth for MIAB82 in Table 9. In some embodiments, the variable light chain has a LCDR1, LCDR2, and a LCDR3 as set forth for MIAB83 in Table 9. In some embodiments, the variable light chain has a LCDR1, LCDR2, and a LCDR3 as set forth for MIAB84 in Table 9. In some embodiments, the variable light chain has a LCDR1, LCDR2, and a LCDR3 as set forth for MIAB85 in Table 9. In some embodiments, the variable light chain has a LCDR1, LCDR2, and a LCDR3 as set forth for MIAB86 in Table 9. In some embodiments, the variable light chain has a LCDR1, LCDR2, and a LCDR3 as set forth for MIAB87 in Table 9. In some embodiments, the variable light chain has a LCDR1, LCDR2, and a LCDR3 as set forth for MIAB88 in Table 9. In some embodiments, the variable light chain has a LCDR1, LCDR2, and a LCDR3 as set forth for MIAB89 in Table 9. In some embodiments, the variable light chain has a LCDR1, LCDR2, and a LCDR3 as set forth for MIAB90 in Table 9. In some embodiments, the variable light chain has a LCDR1, LCDR2, and a LCDR3 as set forth for MIAB91 in Table 9. In some embodiments, the variable light chain has a LCDR1, LCDR2, and a LCDR3 as set forth for MIAB92 in Table 9. In some embodiments, the variable light chain has a LCDR1, LCDR2, and a LCDR3 as set forth for MIAB93 in Table 9. In some embodiments, the variable light chain has a LCDR1, LCDR2, and a LCDR3 as set forth for MIAB94 in Table 9. In some embodiments, the variable light chain has a LCDR1, LCDR2, and a LCDR3 as set forth for MIAB95 in Table 9. In some embodiments, the variable light chain has a LCDR1, LCDR2, and a LCDR3 as set forth for MIAB96 in Table 9. In some embodiments, the variable light chain has a LCDR1, LCDR2, and a LCDR3 as set forth for MIAB97 in Table 9. In some embodiments, the variable light chain has a LCDR1, LCDR2, and a LCDR3 as set forth for MIAB98 in Table 9. In some embodiments, the variable light chain has a LCDR1, LCDR2, and a LCDR3 as set forth for MIAB99 in Table 9. In some embodiments, the variable light chain has a LCDR1, LCDR2, and a LCDR3 as set forth for MIAB100 in Table 9. In some embodiments, the variable light chain has a LCDR1, LCDR2, and a LCDR3 as set forth for MIAB101 in Table 9. In some embodiments, the variable light chain has a LCDR1, LCDR2, and a LCDR3 as set forth for MIAB102 in Table 9. In some embodiments, the variable light chain has a LCDR1, LCDR2, and a LCDR3 as set forth for MIAB103 in Table 9. In some embodiments, the variable light chain has a LCDR1, LCDR2, and a LCDR3 as set forth for MIAB104 in Table 9. In some embodiments, the variable light chain has a LCDR1, LCDR2, and a LCDR3 as set forth for MIAB105 in Table 9. In some embodiments, the variable light chain has a LCDR1, LCDR2, and a LCDR3 as set forth for MIAB106 in Table 9. In some embodiments, the variable light chain has a LCDR1, LCDR2, and a LCDR3 as set forth for MIAB107 in Table 9. In some embodiments, the variable light chain has a LCDR1, LCDR2, and a LCDR3 as set forth for MIAB108 in Table 9. In some embodiments, the variable light chain has a LCDR1, LCDR2, and a LCDR3 as set forth for MIAB109 in Table 9. In some embodiments, the variable light chain has a LCDR1, LCDR2, and a LCDR3 as set forth for MIAB110 in Table 9. In some embodiments, the variable light chain has a LCDR1, LCDR2, and a LCDR3 as set forth for MIAB111 in Table 9. In some embodiments, the variable light chain has a LCDR1, LCDR2, and a LCDR3 as set forth for MIAB112 in Table 9. In some embodiments, the variable light chain has a LCDR1, LCDR2, and a LCDR3 as set forth for MIAB113 in Table 9. In some embodiments, the variable light chain has a LCDR1, LCDR2, and a LCDR3 as set forth for MIAB114 in Table 9. In some embodiments, the variable light chain has a LCDR1, LCDR2, and a LCDR3 as set forth for MIAB115 in Table 9. In some embodiments, the variable light chain has a LCDR1, LCDR2, and a LCDR3 as set forth for MIAB116 in Table 9. In some embodiments, the variable light chain has a LCDR1, LCDR2, and a LCDR3 as set forth for MIAB117 in Table 9. In some embodiments, the variable light chain has a LCDR1, LCDR2, and a LCDR3 as set forth for MIAB118 in Table 9. In some embodiments, the variable light chain has a LCDR1, LCDR2, and a LCDR3 as set forth for MIAB119 in Table 9. In some embodiments, the variable light chain has a LCDR1, LCDR2, and a LCDR3 as set forth for MIAB120 in Table 9. In some embodiments, the variable light chain has a LCDR1, LCDR2, and a LCDR3 as set forth for MIAB121 in Table 9. In some embodiments, the variable light chain has a LCDR1, LCDR2, and a LCDR3 as set forth for MIAB122 in Table 9. In some embodiments, the variable light chain has a LCDR1, LCDR2, and a LCDR3 as set forth for MIAB123 in Table 9. In some embodiments, the variable light chain has a LCDR1, LCDR2, and a LCDR3 as set forth for MIAB124 in Table 9. In some embodiments, the variable light chain has a LCDR1, LCDR2, and a LCDR3 as set forth for MIAB125 in Table 9. In some embodiments, the variable light chain has a LCDR1, LCDR2, and a LCDR3 as set forth for MIAB126 in Table 9. In some embodiments, the variable light chain has a LCDR1, LCDR2, and a LCDR3 as set forth for MIAB127 in Table 9. In some embodiments, the variable light chain has a LCDR1, LCDR2, and a LCDR3 as set forth for MIAB128 in Table 9. In some embodiments, the variable light chain has a LCDR1, LCDR2, and a LCDR3 as set forth for MIAB128A in Table 9. In some embodiments, the variable light chain has a LCDR1, LCDR2, and a LCDR3 as set forth for MIAB129 in Table 9. In some embodiments, the variable light chain has a LCDR1, LCDR2, and a LCDR3 as set forth for MIAB130 in Table 9. In some embodiments, the variable light chain has a LCDR1, LCDR2, and a LCDR3 as set forth for MIAB131 in Table 9. In some embodiments, the variable light chain has a LCDR1, LCDR2, and a LCDR3 as set forth for MIAB132 in Table 9. In some embodiments, the variable light chain has a LCDR1, LCDR2, and a LCDR3 as set forth for MIAB133 in Table 9. In some embodiments, the variable light chain has a LCDR1, LCDR2, and a LCDR3 as set forth for MIAB134 in Table 9. In some embodiments, the variable light chain has a LCDR1, LCDR2, and a LCDR3 as set forth for MIAB135 in Table 9. In some embodiments, the variable light chain has a LCDR1, LCDR2, and a LCDR3 as set forth for MIAB136 in Table 9. In some embodiments, the variable light chain has a LCDR1, LCDR2, and a LCDR3 as set forth for MIAB137 in Table 9. In some embodiments, the variable light chain has a LCDR1, LCDR2, and a LCDR3 as set forth for MIAB138 in Table 9. In some embodiments, the variable light chain has a LCDR1, LCDR2, and a LCDR3 as set forth for MIAB139 in Table 9. In some embodiments, the variable light chain has a LCDR1, LCDR2, and a LCDR3 as set forth for MIAB140 in Table 9. In some embodiments, the variable light chain has a LCDR1, LCDR2, and a LCDR3 as set forth for MIAB141 in Table 9. In some embodiments, the variable light chain has a LCDR1, LCDR2, and a LCDR3 as set forth for MIAB142 in Table 9. In some embodiments, the variable light chain has a LCDR1, LCDR2, and a LCDR3 as set forth for MIAB143 in Table 9. In some embodiments, the variable light chain has a LCDR1, LCDR2, and a LCDR3 as set forth for MIAB144 in Table 9. In some embodiments, the variable light chain has a LCDR1, LCDR2, and a LCDR3 as set forth for MIAB145 in Table 9. In some embodiments, the variable light chain has a LCDR1, LCDR2, and a LCDR3 as set forth for MIAB146 in Table 9. In some embodiments, the variable light chain has a LCDR1, LCDR2, and a LCDR3 as set forth for MIAB147 in Table 9. In some embodiments, the variable light chain has a LCDR1, LCDR2, and a LCDR3 as set forth for MIAB148 in Table 9. In some embodiments, the variable light chain has a LCDR1, LCDR2, and a LCDR3 as set forth for MIAB149 in Table 9. In some embodiments, the variable light chain has a LCDR1, LCDR2, and a LCDR3 as set forth for MIAB150 in Table 9. In some embodiments, the variable light chain has a LCDR1, LCDR2, and a LCDR3 as set forth for MIAB151 in Table 9. In some embodiments, the variable light chain has a LCDR1, LCDR2, and a LCDR3 as set forth for MIAB152 in Table 9. In some embodiments, the variable light chain has a LCDR1, LCDR2, and a LCDR3 as set forth for MIAB153 in Table 9. In some embodiments, the variable light chain has a LCDR1, LCDR2, and a LCDR3 as set forth for MIAB154 in Table 9. In some embodiments, the variable light chain has a LCDR1, LCDR2, and a LCDR3 as set forth for MIAB155 in Table 9. In some embodiments, the variable light chain has a LCDR1, LCDR2, and a LCDR3 as set forth for MIAB156 in Table 9. In some embodiments, the variable light chain has a LCDR1, LCDR2, and a LCDR3 as set forth for MIAB157 in Table 9. In some embodiments, the variable light chain has a LCDR1, LCDR2, and a LCDR3 as set forth for MIAB158 in Table 9. In some embodiments, the variable light chain has a LCDR1, LCDR2, and a LCDR3 as set forth for MIAB159 in Table 9. In some embodiments, the variable light chain has a LCDR1, LCDR2, and a LCDR3 as set forth for MIAB160 in Table 9. In some embodiments, the variable light chain has a LCDR1, LCDR2, and a LCDR3 as set forth for MIAB161 in Table 9. In some embodiments, the variable light chain has a LCDR1, LCDR2, and a LCDR3 as set forth for MIAB162 in Table 9. In some embodiments, the variable light chain has a LCDR1, LCDR2, and a LCDR3 as set forth for MIAB163 in Table 9. In some embodiments, the variable light chain has a LCDR1, LCDR2, and a LCDR3 as set forth for MIAB164 in Table 9. In some embodiments, the variable light chain has a LCDR1, LCDR2, and a LCDR3 as set forth for MIAB165 in Table 9. In some embodiments, the variable light chain has a LCDR1, LCDR2, and a LCDR3 as set forth for MIAB166 in Table 9. In some embodiments, the variable light chain has a LCDR1, LCDR2, and a LCDR3 as set forth for MIAB167 in Table 9. In some embodiments, the variable light chain has a LCDR1, LCDR2, and a LCDR3 as set forth for MIAB168 in Table 9. In some embodiments, the variable light chain has a LCDR1, LCDR2, and a LCDR3 as set forth for MIAB169 in Table 9. In some embodiments, the variable light chain has a LCDR1, LCDR2, and a LCDR3 as set forth for MIAB170 in Table 9. In some embodiments, the variable light chain has a LCDR1, LCDR2, and a LCDR3 as set forth for MIAB171 in Table 9. In some embodiments, the variable light chain has a LCDR1, LCDR2, and a LCDR3 as set forth for MIAB172 in Table 9. In some embodiments, the variable light chain has a LCDR1, LCDR2, and a LCDR3 as set forth for MIAB173 in Table 9. In some embodiments, the variable light chain has a LCDR1, LCDR2, and a LCDR3 as set forth for MIAB174 in Table 9. In some embodiments, the variable light chain has a LCDR1, LCDR2, and a LCDR3 as set forth for MIAB175 in Table 9. In some embodiments, the variable light chain has a LCDR1, LCDR2, and a LCDR3 as set forth for MIAB176 in Table 9. In some embodiments, the variable light chain has a LCDR1, LCDR2, and a LCDR3 as set forth for MIAB177 in Table 9. In some embodiments, the variable light chain has a LCDR1, LCDR2, and a LCDR3 as set forth for MIAB178 in Table 9. In some embodiments, the variable light chain has a LCDR1, LCDR2, and a LCDR3 as set forth for MIAB179 in Table 9. In some embodiments, the variable light chain has a LCDR1, LCDR2, and a LCDR3 as set forth for MIAB180 in Table 9. In some embodiments, the variable light chain has a LCDR1, LCDR2, and a LCDR3 as set forth for MIAB181 in Table 9. In some embodiments, the variable light chain has a LCDR1, LCDR2, and a LCDR3 as set forth for MIAB182 in Table 9. In some embodiments, the variable light chain has a LCDR1, LCDR2, and a LCDR3 as set forth for MIAB183 in Table 9. In some embodiments, the variable light chain has a LCDR1, LCDR2, and a LCDR3 as set forth for MIAB184 in Table 9. In some embodiments, the variable light chain has a LCDR1, LCDR2, and a LCDR3 as set forth for MIAB185 in Table 9. In some embodiments, the variable light chain has a LCDR1, LCDR2, and a LCDR3 as set forth for MIAB186 in Table 9. In some embodiments, the variable light chain has a LCDR1, LCDR2, and a LCDR3 as set forth for MIAB187 in Table 9. In some embodiments, the variable light chain has a LCDR1, LCDR2, and a LCDR3 as set forth for MIAB188 in Table 9. In some embodiments, the variable light chain has a LCDR1, LCDR2, and a LCDR3 as set forth for MIAB189 in Table 9. In some embodiments, the variable light chain has a LCDR1, LCDR2, and a LCDR3 as set forth for MIAB190 in Table 9. In some embodiments, the variable light chain has a LCDR1, LCDR2, and a LCDR3 as set forth for MIAB191 in Table 9. In some embodiments, the variable light chain has a LCDR1, LCDR2, and a LCDR3 as set forth for MIAB192 in Table 9. In some embodiments, the variable light chain has a LCDR1, LCDR2, and a LCDR3 as set forth for MIAB193 in Table 9. In some embodiments, the variable light chain has a LCDR1, LCDR2, and a LCDR3 as set forth for MIAB194 in Table 9. In some embodiments, the variable light chain has a LCDR1, LCDR2, and a LCDR3 as set forth for MIAB195 in Table 9. In some embodiments, the variable light chain has a LCDR1, LCDR2, and a LCDR3 as set forth for MIAB196 in Table 9. In some embodiments, the variable light chain has a LCDR1, LCDR2, and a LCDR3 as set forth for MIAB197 in Table 9. In some embodiments, the variable light chain has a LCDR1, LCDR2, and a LCDR3 as set forth for MIAB198 in Table 9. In some embodiments, the variable light chain has a LCDR1, LCDR2, and a LCDR3 as set forth for MIAB205 in Table 9. In some embodiments, the variable light chain has a LCDR1, LCDR2, and a LCDR3 as set forth for MIAB206 in Table 9. In some embodiments, the variable light chain has a LCDR1, LCDR2, and a LCDR3 as set forth for MIAB207 in Table 9. In some embodiments, the variable light chain has a LCDR1, LCDR2, and a LCDR3 as set forth for MIAB208 in Table 9. In some embodiments, the variable light chain has a LCDR1, LCDR2, and a LCDR3 as set forth for MIAB209 in Table 9.

[0543] In some embodiments, the variable light chain has a LCDR1, LCDR2, and a LCDR3 as set forth for PMAB1 in Table 14. In some embodiments, the variable light chain has a LCDR1, LCDR2, and a LCDR3 as set forth for PMAB3 in Table 14. In some embodiments, the variable light chain has a LCDR1, LCDR2, and a LCDR3 as set forth for PMAB4 in Table 14. In some embodiments, the variable light chain has a LCDR1, LCDR2, and a LCDR3 as set forth for PMAB5 in Table 14. In some embodiments, the variable light chain has a LCDR1, LCDR2, and a LCDR3 as set forth for PMAB6 in Table 14. In some embodiments, the variable light chain has a LCDR1, LCDR2, and a LCDR3 as set forth for PMAB7 in Table 14. In some embodiments, the variable light chain has a LCDR1, LCDR2, and a LCDR3 as set forth for PMAB8 in Table 14. In some embodiments, the variable light chain has a LCDR1, LCDR2, and a LCDR3 as set forth for PMAB9 in Table 14. In some embodiments, the variable light chain has a LCDR1, LCDR2, and a LCDR3 as set forth for PMAB1 in Table 14. In some embodiments, the variable light chain has a LCDR1, LCDR2, and a LCDR3 as set forth for PMAB10 in Table 14. In some embodiments, the variable light chain has a LCDR1, LCDR2, and a LCDR3 as set forth for PMAB11 in Table 14. In some embodiments, the variable light chain has a LCDR1, LCDR2, and a LCDR3 as set forth for PMAB12 in Table 14. In some embodiments, the variable light chain has a LCDR1, LCDR2, and a LCDR3 as set forth for PMAB13 in Table 14. In some embodiments, the variable light chain has a LCDR1, LCDR2, and a LCDR3 as set forth for PMAB14 in Table 14. In some embodiments, the variable light chain has a LCDR1, LCDR2, and a LCDR3 as set forth for PMAB15 in Table 14. In some embodiments, the variable light chain has a LCDR1, LCDR2, and a LCDR3 as set forth for PMAB16 in Table 14. In some embodiments, the variable light chain has a LCDR1, LCDR2, and a LCDR3 as set forth for PMAB1 in Table 14. In some embodiments, the variable light chain has a LCDR1, LCDR2, and a LCDR3 as set forth for PMAB19 in Table 14. In some embodiments, the variable light chain has a LCDR1, LCDR2, and a LCDR3 as set forth for PMAB20 in Table 14. In some embodiments, the variable light chain has a LCDR1, LCDR2, and a LCDR3 as set forth for PMAB21 in Table 14. In some embodiments, the variable light chain has a LCDR1, LCDR2, and a LCDR3 as set forth for PMAB22 in Table 14. In some embodiments, the variable light chain has a LCDR1, LCDR2, and a LCDR3 as set forth for PMAB23 in Table 14. In some embodiments, the variable light chain has a LCDR1, LCDR2, and a LCDR3 as set forth for PMAB24 in Table 14. In some embodiments, the variable light chain has a LCDR1, LCDR2, and a LCDR3 as set forth for PMAB25 in Table 14. In some embodiments, the variable light chain has a LCDR1, LCDR2, and a LCDR3 as set forth for PMAB26 in Table 14. In some embodiments, the variable light chain has a LCDR1, LCDR2, and a LCDR3 as set forth for PMAB27 in Table 14. In some embodiments, the variable light chain has a LCDR1, LCDR2, and a LCDR3 as set forth for PMAB28 in Table 14. In some embodiments, the variable light chain has a LCDR1, LCDR2, and a LCDR3 as set forth for PMAB29 in Table 14. In some embodiments, the variable light chain has a LCDR1, LCDR2, and a LCDR3 as set forth for PMAB30 in Table 14. In some embodiments, the variable light chain has a LCDR1, LCDR2, and a LCDR3 as set forth for PMAB31 in Table 14. In some embodiments, the variable light chain has a LCDR1, LCDR2, and a LCDR3 as set forth for PMAB32 in Table 14. In some embodiments, the variable heavy chain has a HCDR1, HCDR2, and a HCDR33 as set forth for PMAB33 in Table 14. In some embodiments, the variable light chain has a LCDR1, LCDR2, and a LCDR3 as set forth for PMAB34 in Table 14. In some embodiments, the variable light chain has a LCDR1, LCDR2, and a LCDR3 as set forth for PMAB35 in Table 14. In some embodiments, the variable light chain has a LCDR1, LCDR2, and a LCDR3 as set forth for PMAB36 in Table 14. In some embodiments, the variable light chain has a LCDR1, LCDR2, and a LCDR3 as set forth for PMAB37 in Table 14. In some embodiments, the variable light chain has a LCDR1, LCDR2, and a LCDR3 as set forth for PMAB38 in Table 14. In some embodiments, the variable light chain has a LCDR1, LCDR2, and a LCDR3 as set forth for PMAB39 in Table 14. In some embodiments, the variable light chain has a LCDR1, LCDR2, and a LCDR3 as set forth for PMAB40 in Table 14. In some embodiments, the variable light chain has a LCDR1, LCDR2, and a LCDR3 as set forth for PMAB41 in Table 14. In some embodiments, the variable light chain has a LCDR1, LCDR2, and a LCDR3 as set forth for PMAB42 in Table 14. In some embodiments, the variable light chain has a LCDR1, LCDR2, and a LCDR3 as set forth for PMAB43 in Table 14. In some embodiments, the variable light chain has a LCDR1, LCDR2, and a LCDR3 as set forth for PMAB44 in Table 14. In some embodiments, the variable light chain has a LCDR1, LCDR2, and a LCDR3 as set forth for PMAB45 in Table 14. In some embodiments, the variable light chain has a LCDR1, LCDR2, and a LCDR3 as set forth for PMAB46 in Table 14. In some embodiments, the variable light chain has a LCDR1, LCDR2, and a LCDR3 as set forth for PMAB47 in Table 14. In some embodiments, the variable light chain has a LCDR1, LCDR2, and a LCDR3 as set forth for PMAB48 in Table 14. In some embodiments, the variable light chain has a LCDR1, LCDR2, and a LCDR3 as set forth for PMAB49 in Table 14. In some embodiments, the variable light chain has a LCDR1, LCDR2, and a LCDR3 as set forth for PMAB50 in Table 14. In some embodiments, the variable light chain has a LCDR1, LCDR2, and a LCDR3 as set forth for PMAB51 in Table 14. In some embodiments, the variable light chain has a LCDR1, LCDR2, and a LCDR3 as set forth for PMAB52 in Table 14. In some embodiments, the variable light chain has a LCDR1, LCDR2, and a LCDR3 as set forth for PMAB53 in Table 14. In some embodiments, the variable light chain has a LCDR1, LCDR2, and a LCDR3 as set forth for PMAB55 in Table 14.

[0544] In some embodiments, the variable light chain has a LCDR1, LCDR2, and a LCDR3 as set forth for MIAB212 in Table 15. In some embodiments, the variable light chain has a LCDR1, LCDR2, and a LCDR3 as set forth for MIAB213 in Table 15. In some embodiments, the variable light chain has a LCDR1, LCDR2, and a LCDR3 as set forth for MIAB214 in Table 15. In some embodiments, the CDRS are swapped for one another. For example, the HCDR1 of clone 1 can be substituted for the HCDR1 of clone 10, or vice versa. This CDR swapping can be done for any of the HCDRs of the clones provided herein (e.g., HCDR1 for HCDR1; HCDR2 for HCDR2; or HCDR3 for HCDR3) or the LCDRs (e.g., LCDR1 for LCDR1; LCDR2 for LCDR2; or LCDR3 for LCDR3). Therefore, in some embodiments, the antibody comprises a HCDR1 as set forth in any of Clones 1-66 of Table 6, Clones 1-84 of Table 7, MIAB1-198 or MIAB205-209 of Table 9, PMAB1-55 of Table 14, or PMAB212-214 of Table a HCDR2 as set forth in any of Clones 1-66 of Table 6, Clones 1-84 of Table 7, MIAB1-198 or MIAB205-209 of Table 9, PMAB1-55 of Table 14, or PMAB212-214 of Table 15; a HCDR3 as set forth in any of Clones 1-66 of Table 6, Clones 1-84 of Table 7, MIAB1-198 or MIAB205-209 of Table 9, PMAB1-55 of Table 14, or PMAB212-214 of Table 15; a LCDR1 as set forth in any of Clones 1-66 of Table 6, Clones 1-84 of Table 7, MIAB1-198 or MIAB205-209 of Table 9, PMAB1-55 of Table 14, or PMAB212-214 of Table 15; a LCDR2 as set forth in any of Clones 1-66 of Table 6, Clones 1-84 of Table 7, MIAB1-198 or MIAB205-209 of Table 9, PMAB1-55 of Table 14, or PMAB212-214 of Table 15; a LCDR3 as set forth in any of Clones 1-66 of Table 6, Clones 1-84 of Table 7, MIAB1-198 or MIAB205-209 of Table 9, PMAB1-55 of Table 14, or PMAB212-214 of Table 15, or a variant of any of the foregoing.

[0545] In some embodiments, the MAdCAM Antibody is a scFv format as shown in clones 6, 59, 63, MIAB199, MIAB200, MIAB201, MIAB202, MIAB203, MIAB204, or PMAB1-55. The linker as shown in those sequences is 20 amino acid residues in length, but could also be 5, 10, or 15 amino acid residues in length. In some embodiments, the linker the links the VH and VL (or VK) sequences of the antibody is a glycine/serine linker, which can be a sequence of GGGGSGGGGSGGGGSGGGGS (SEQ ID NO: 22), or GGGGSGGGGSGGGGS (SEQ ID NO: This is simply a non-limiting example and the linker can have varying number of GGGGS (SEQ ID NO: 23), or GGGGA repeats (SEQ ID NO: 29). In some embodiments, the linker comprises 1, 2, 3, 4, 5, 6, 7, 8, 9, or 10 of the GGGGS (SEQ ID NO: 23), or GGGGA repeats (SEQ ID NO: 29) (repeats disclosed as SEQ ID NOS 1550-1551, respectively). Thus, the linkers shown in Table 6 are non-limiting examples and can be substituted with any other linkers, such as those provided for herein.

[0546] In some embodiments, the polypeptide comprises the formula of:

(SEQ ID NOS 1552-1553, respectively)
APTSSSTKKTQLQLEHLLLDLQMILNGINNYKNPKLTRMLTFKFYMPKKA
TELKHLQCLEEELKPLEEALNLAPSKNFHLRPRDLISDINVIVLELKGSE
TTFMCEYADETATIVEFINRWITFSQSIISTLT-Linker1-
DKTHTCPPCPAPEAAGAPSVFLFPPKPKDTLMISRTPEVTCVVVDVSHED
PEVKFNWYVDGVEVHNAKTKPREEQYNSTYRVVSVLTVLHQDWLNGKEYK
CKVSNKALPAPIEKTISKAKGQPREPQVYTLPPSREEMTKNQVSLTCLVK
GFYPSDIAVEWESNGQPENNYKTTPPVLDSDGSFFLYSKLTVDKSRWQQG
NVFSCSVMHEALHNHYTQKSLSLSPG-Linker2-Ab,

wherein Linker 1, Linker2, and Ab are as provided herein. In some embodiments, Linker 1 is GGGGSGGGGSGGGGS (SEQ ID NO: 30) or GGGGSGGGGSGGGGSGGGGS (SEQ ID NO: 22). In some embodiments, Linker 1 is GGGGSGGGGSGGGGSGGGGS (SEQ ID NO: 22). In some embodiments, Linker 1 is GGGGS (SEQ ID NO: 23). In some embodiments, Linker 1 is GGGGSGGGGS (SEQ ID NO: 619). In some embodiments, Linker 1 is GGGGSGGGGSGGGGS (SEQ ID NO: 30). In some embodiments, Linker 2 is GGGGS (SEQ ID NO: 23). In some embodiments, Linker 2 is GGGGSGGGGS (SEQ ID NO: 619). In some embodiments, Linker 2 is GGGGSGGGGSGGGGS (SEQ ID NO: 30). In some embodiments, Linker 2 is GGGGSGGGGSGGGGSGGGGS (SEQ ID NO: 22). In some embodiments, Ab is the scFV as set forth in Table 6, Table 12, or Table 14. In some embodiments, the Ab comprises a sequence of SEQ ID NO: 95. In some embodiments, the Ab comprises a sequence of SEQ ID NO: 364. In some embodiments, the Ab comprises a sequence of SEQ ID NO: 386. In some embodiments, the Ab comprises a sequences of SEQ ID NOs: 41, 22, 1437, 30, 591, 22, and 592. In some embodiments, the Ab comprises a VH and a VK or VL segment. In some embodiments, the VH comprises a sequence as set forth in Table 7, Table 9, Table 10, Table 12, or Table 14. In some embodiments, the VL comprises a sequence as set forth in Table 7, Table 9, Table 10, Table 12, or Table 14. In some embodiments, the Ab comprises a VH and a VL as set forth for the clones in Table 7, Table 9, Table 10, Table 12, or Table 14. In some embodiments, the VH and VL are linked by a linker. In some embodiments, the VH and VL are linked by a peptide linker comprising a peptide of GGGGSGGGGSGGGGSGGGGS (SEQ ID NO: 22). In some embodiments, the VH and VL are linked by a peptide linker comprising a peptide of GGGGS (SEQ ID NO: 23). In some embodiments, the VH and VL are linked by a peptide linker comprising a peptide of GGGGSGGGGS (SEQ ID NO: 619). In some embodiments, the VH and VL are linked by a peptide linker comprising a peptide of GGGGSGGGGSGGGGS (SEQ ID NO: 30).

[0547] In some embodiments, the Ab comprises a VH of SEQ ID NO: 414 and a VL of SEQ ID NO: 415. In some embodiments, the Ab comprises a VH of SEQ ID NO: 591 and a VL of SEQ ID NO: 592. In some embodiments, the Ab comprises a VH of SEQ ID NO: 599 and a VL of SEQ ID NO: 600. In some embodiments, the Ab comprises a VH of SEQ ID NO: 880 and a VL of SEQ ID NO: 663. In some embodiments, the Ab comprises a VH of SEQ ID NO: 1387 and a VL of SEQ ID NO: 1363.

[0548] In some embodiments, the peptide comprises:

(SEQ ID NO: 1554)
APTSSSTKKTQLQLEHLLLDLQMILNGINNYKNPKLTRMLTFKFYMPKKA
TELKHLQCLEEELKPLEEALNLAPSKNFHLRPRDLISDINVIVLELKGSE
TTFMCEYADETATIVEFINRWITFSQSIISTLT-(GGGGGGGGSGGGGS
or GGGGSGGGGSGGGGSGGGGS)-DKTHTCPPCPAPEAAGAPSVFLFPP
KPKDTLMISRTPEVTCVVVDVSHEDPEVKFNWYVDGVEVHNAKTKPREEQ
YNSTYRVVSVLTVLHQDWLNGKEYKCKVSNKALPAPIEKTISKAKGQPRE
PQVYTLPPSREEMTKNQVSLTCLVKGFYPSDIAVEWESNGQPENNYKTTP
PVLDSDGSFFLYSKLTVDKSRWQQGNVFSCSVMHEALHNHYTQKSLSLSP
G-(GGGGS or GGGGSGGGGS or GGGGSGGGGSGGGGS)-Ab,

wherein Ab is set forth as herein. In some embodiments, the Ab comprises a sequence of SEQ ID NO: 95. In some embodiments, the Ab comprises a sequence of SEQ ID NO: 364. In some embodiments, the Ab comprises a sequence of SEQ ID NO: 386. In some embodiments, the Ab comprises a VH and a VK or VL segment. In some embodiments, the VH comprises a sequence as set forth in Table 7, Table 9, Table 10, Table 12, or Table 14. In some embodiments, the VL comprises a sequence as set forth in Table 7, Table 9, Table 10, Table 12, or Table 14. In some embodiments, the Ab comprises a VH and a VL as set forth for the clones in Table 7, Table 9, Table 10, Table 12, or Table 14. In some embodiments, the VH and VL are linked by a linker. In some embodiments, the VH and VL are linked by a peptide linker comprising a peptide of GGGGSGGGGSGGGGSGGGGS (SEQ ID NO: 22). In some embodiments, the VH and VK are linked by a peptide linker comprising a peptide of GGGGS (SEQ ID NO: 23). In some embodiments, the VH and VL are linked by a peptide linker comprising a peptide of GGGGSGGGGS (SEQ ID NO: 619).
In some embodiments, the Ab comprises a VH of SEQ ID NO: 414 and a VL of SEQ ID NO: 415. In some embodiments, the Ab comprises a VH of SEQ ID NO: 591 and a VL of SEQ ID NO: 592. In some embodiments, the Ab comprises a VH of SEQ ID NO: 599 and a VL of SEQ ID NO: 600. In some embodiments, the Ab comprises a VH of SEQ ID NO: 880 and a VL of SEQ ID NO: 663. In some embodiments, the Ab comprises a VH of SEQ ID NO: 1387 and a VL of SEQ ID NO: 1363. These examples are non-limiting the combinations of VH and VK as shown in Table 7, Table 9, Table 10, Table 12, or Table 14 are also provided.

[0549] In some embodiments, the therapeutic compound or polypeptide comprises a formula of an anti-PD-1 heavy and light chain, wherein the PD-1 heavy chain is linked to a MAdCAM antibody (scFV), such as those provided herein at the C-terminus of the PD-1 IgG heavy chain. The polypeptide can have the formula of A1-A2-Linker1-A4-Linker2-A5 and A6, wherein A1 is a PD-1 heavy chain, A6 is a PD-1 light chain; A2 is a IgG constant domain (e.g. IgG1 Constant domain), Linker 1 is as provided herein, such as, but not limited to, a glycine/serine linker, which can be a sequence of GGGGSGGGGSGGGGSGGGGS (SEQ ID NO: 22) or GGGGSGGGGSGGGGS (SEQ ID NO: 30), or GGGSEGGGSEGGGSE (SEQ ID NO: 1546) which are simply a non-limiting example and the linker can have varying number of GGGGS (SEQ ID NO: 23) or GGGGA repeats (SEQ ID NO: 29) and in some embodiments, the linker comprises 1, 2, 3, 4, 5, 6, 7, 8, 9, or 10 of the GGGGS (SEQ ID NO: 23) or GGGGA repeats (SEQ ID NO: 29) (repeats disclosed as SEQ ID NOS 1550-1551, respectively); A4 is VH domain, such as those set forth in Table 7; Linker 2 is as provided herein, such as, but not limited to, a glycine/serine linker, which can be a sequence of GGGGSGGGGSGGGGSGGGGS (SEQ ID NO: 22), GGGSEGGGSEGGGSE (SEQ ID NO: 1546), or GGGGSGGGGSGGGGS (SEQ ID NO: 30), which are simply a non-limiting example and the linker can have varying number of GGGGS (SEQ ID NO: 23) or GGGGA repeats (SEQ ID NO: 29) and in some embodiments, the linker comprises 1, 2, 3, 4, 5, 6, 7, 8, 9, or 10 of the GGGGS (SEQ ID NO: 23) or GGGGA repeats (SEQ ID NO: 29) (repeats disclosed as SEQ ID NOS 1550-1551, respectively); and A5 is VK/VL domain, such as those set forth in Table 7. In some embodiments, Linker 2 is GGGGSGGGGSGGGGS (SEQ ID NO: 30). In some embodiments, the A4-Linker2-A5 is a scFV antibody, such as those set forth in Table 6. The linkers shown in Table 6 can be substituted with the linker of GGGGSGGGGSGGGGS (SEQ ID NO: 30). In some embodiments, the A4-Linker2-A5 comprises the HCDR sets (e.g., HCDR1, HCDR2, HCDR3, LCDR1, LCDR2, and LCDR3) sets as set forth in Table 6 or Table 7. For the avoidance of doubt, a CDR set refers to the CDRs illustrated for each of the different antibody clones provided for in the tables. In some embodiments, A4 comprises a peptide of SEQ ID NO: 414 and A5 comprises a peptide of SEQ ID NO: 415. In some embodiments, A4 comprises a peptide of SEQ ID NO: 591 and A5 comprises a peptide of SEQ ID NO: 592. In some embodiments, A4 comprises a peptide of SEQ ID NO: 599 and A5 comprises a peptide of SEQ ID NO: 600. These examples are non-limiting the combinations of VH and VK as shown in Table 7, Table 12, or Table 14 are also provided.

[0550] In some embodiments, A2 comprises a sequence of

(SEQ ID NO: 44)
ASTKGPSVFPLAPSSKSTSGGTAALGCLVKDYFPEPVTVSWNSGALTSGV
HTFPAVLQSSGLYSLSSVVTVPSSSLGTQTYICNVNHKPSNTKVDKKVEP
KSCDKTHTCPPCPAPEAAGAPSVFLFPPKPKDTLMISRTPEVTCVVVDVS
HEDPEVKFNWYVDGVEVHNAKTKPREEQYNSTYRVVSVLTVLHQDWLNGK
EYKCKVSNKALPAPIEKTISKAKGQPREPQVYTLPPSREEMTKNQVSLTC
LVKGFYPSDIAVEWESNGQPENNYKTTPPVLDSDGSFFLYSKLTVDKSRW
QQGNVFSCSVMHEALHNHYTQKSLSLSPG

[0551] Once expressed the heavy and light chains of the PD-1 antibody bind to one another to form the compound comprising the anti-PD-1 antibody linked to the anti-MAdCAM antibody. The anti-MAdCAM antibody can be any antibody that binds to MAdCAM, such as those provided for herein.

[0552] In some embodiments, the therapeutic comprises one or more sequences selected from the sequence in the following table:

TABLE 12

| | | | Fc- | | | | | |
|---|---|---|---|---|---|---|---|---|
| | | | scFv | | Intra | | | |
| | Fab VH | IgG1 Constant | Linker | scFv VH | scFv | scFv VK | | |
| Ab | Seq | Domain Seq | Seq | Seq | Linker | Seq | Fab VL | CK |
| PMAB1 | EVQLLE | ASTKGPSVFPLAPSS | GGGGSG | EVQLLES | GGGGSG | DIQMTQS | DIVMTQS | RTVAAPSV |
| | SGGGLV | KSTSGGTAALGCLVK | GGGSGG | GGGLVQP | GGGSGG | PSSLSAS | PDSLAVS | FIFPPSDE |
| | QPGGSL | DYFPEPVTVSWNSGA | GGS | GGSLRLS | GGSGGG | VGDRVTI | LGERATI | QLKSGTAS |
| | RLSCAA | LTSGVHTFPAVLQSS | (SEQ | CAASGFT | GS | TCRASQS | NCKSSQS | VVCLLNNF |
| | SGFTFS | GLYSLSSVVTVPSSS | ID NO: | FSDFWMH | (SEQ | VSRSLAW | VLYSPNN | YPREAKVQ |
| | NSDMSW | LGTQTYICNVNHKPS | 30) | WVRQAPG | ID NO: | YQQKPGK | KNYLAWY | WKVDNALQ |
| | VRQAPG | NTKVDKKVEPKSCDK | | KGLEWIS | 22) | APKLLIY | QQKPGQP | SGNSQESV |
| | KGLEWV | THTCPPCPAPEAAGA | | YISGDSG | | AASSLQS | PKLLIYW | TEQDSKDS |
| | SGITIS | PSVFLFPPKPKDTLM | | YTNYADS | | GVPSRFS | ASTRESG | TYSLSSTL |
| | GGSTYY | ISRTPEVTCVVVDVS | | VKGRFTI | | GSGSGTD | VPDRFSG | TLSKADYE |
| | ADSVKG | HEDPEVKFNWYVDGV | | SRDNSKN | | FTLTISS | SGSGTDF | KHKVYACE |
| | RFTISR | EVHNAKTKPREEQYN | | TLYLQMN | | LQPEDFA | TLTISSL | VTHQGLSS |
| | DNSKNT | STYRVVSVLTVLHQD | | SLRAEDT | | TYYCQQY | QAEDVAV | PVTKSFNR |
| | LYLQMN | WLNGKEYKCKVSNKA | | AVYYCAR | | KSYPVTF | YYCQQYY | GEC (SEQ |
| | SLRAED | LPAPIEKTISKAKGQ | | DRPYYYY | | GQGTKVE | TTPPTFG | ID NO: |
| | TAVYYC | PREPQVYTLPPSREE | | MDVWGKG | | IK (SEQ | QGTRLEI | 45) |
| | ARGRGG | MTKNQVSLTCLVKGF | | TTVTVSS | | ID NO: | K (SEQ | |
| | SGWLDY | YPSDIAVEWESNGQP | | (SEQ ID | | 592) | ID NO: | |
| | WGQGTL | ENNYKTTPPVLDSDG | | NO: | | | 1359) | |
| | VTVSS | SFFLYSKLTVDKSRW | | 591) | | | | |
| | (SEQ | QQGNVFSCSVMHEAL | | | | | | |
| | ID NO: | HNHYTQKSLSLSPG | | | | | | |
| | 1438) | (SEQ ID NO: 44) | | | | | | |
| PMAB2 | EVQLLE | ASTKGPSVFPLAPSS | GGGGSG | EVQLLES | GGGGSG | DIQMTQS | DIVMTQS | RTVAAPSV |
| | SGGGLV | KSTSGGTAALGCLVK | GGGSGG | GGGLVQP | GGGSGG | PSSLSAS | PDSLAVS | FIFPPSDE |
| | QPGGSL | DYFPEPVTVSWNSGA | GGS | GGSLRLS | GGSGGG | VGDRVTI | LGERATI | QLKSGTAS |
| | RLSCAA | LTSGVHTFPAVLQSS | (SEQ | CAASGFT | GS | TCRASQS | NCKSSQS | VVCLLNNF |
| | SGFTFS | GLYSLSSVVTVPSSS | ID NO: | FSSYWMH | (SEQ | ISSSLAW | VLYSPNN | YPREAKVQ |
| | NSDMSW | LGTQTYICNVNHKPS | 30) | WVRQAPG | ID NO: | YQQKPGK | KNYLAWY | WKVDNALQ |
| | VRQAPG | NTKVDKKVEPKSCDK | | KGLEWVS | 22) | APKLLIY | QQKPGQP | SGNSQESV |
| | KGLEWV | THTCPPCPAPEAAGA | | AISGSSG | | AASSLQS | PKLLIYW | TEQDSKDS |
| | SGITIS | PSVFLFPPKPKDTLM | | STYYADS | | GVPSRFS | ASTRESG | TYSLSSTL |
| | GGSTYY | ISRTPEVTCVVVDVS | | VKGRFTI | | GSGSGTD | VPDRFSG | TLSKADYE |
| | ADSVKG | HEDPEVKFNWYVDGV | | SRDNSKN | | FTLTISS | SGSGTDF | KHKVYACE |
| | RFTISR | EVHNAKTKPREEQYN | | TLYLQMN | | LQPEDFA | TLTISSL | VTHQGLSS |
| | DNSKNT | STYRVVSVLTVLHQD | | SLRAEDT | | TYYCQQY | QAEDVAV | PVTKSFNR |
| | LYLQMN | WLNGKEYKCKVSNKA | | AVYYCAR | | KSYPVTF | YYCQQYY | GEC (SEQ |
| | SLRAED | LPAPIEKTISKAKGQ | | DRPYGYY | | GQGTKVE | TTPPTFG | ID NO: |
| | TAVYYC | PREPQVYTLPPSREE | | MDVWGKG | | IK (SEQ | QGTRLEI | 45) |
| | ARGRGG | MTKNQVSLTCLVKGF | | TTVTVSS | | ID NO: | K (SEQ | |
| | SGWLDY | YPSDIAVEWESNGQP | | (SEQ ID | | 1367) | ID NO: | |
| | WGQGTL | ENNYKTTPPVLDSDG | | NO: | | | | |
| | VTVSS | SFFLYSKLTVDKSRW | | 1347) | | | 1359) | |
| | (SEQ | QQGNVFSCSVMHEAL | | | | | | |
| | ID NO: | HNHYTQKSLSLSPG | | | | | | |
| | 1438) | (SEQ ID NO: 44) | | | | | | |
| PMAB3 | EVQLLE | ASTKGPSVFPLAPSS | GGGGSG | EVQLLES | GGGGSG | DIQMTQS | DIVMTQS | RTVAAPSV |
| | SGGGLV | KSTSGGTAALGCLVK | GGGSGG | GGGLVQP | GGGSGG | PSSLSAS | PDSLAVS | FIFPPSDE |
| | QPGGSL | DYFPEPVTVSWNSGA | GGS | GGSLRLS | GGSGGG | VGDRVTI | LGERATI | QLKSGTAS |
| | RLSCAA | LTSGVHTFPAVLQSS | (SEQ | CAASGFT | GS | TCRASQS | NCKSSQS | VVCLLNNF |
| | SGFTFS | GLYSLSSVVTVPSSS | ID NO: | FSSYWMH | (SEQ | ISSSLAW | VLYSPNN | YPREAKVQ |
| | NSDMSW | LGTQTYICNVNHKPS | 30) | WVRQAPG | ID NO: | YQQKPGK | KNYLAWY | WKVDNALQ |
| | VRQAPG | NTKVDKKVEPKSCDK | | KGLEWVS | 22) | APKLLIY | QQKPGQP | SGNSQESV |
| | KGLEWV | THTCPPCPAPEAAGA | | AISGSSG | | AASSLQS | PKLLIYW | TEQDSKDS |
| | SGITIS | PSVFLFPPKPKDTLM | | STYYADS | | GVPSRFS | ASTRESG | TYSLSSTL |
| | GGSTYY | ISRTPEVTCVVVDVS | | VKGRFTI | | GSGSGTD | VPDRFSG | TLSKADYE |
| | ADSVKG | HEDPEVKFNWYVDGV | | SRDNSKN | | FTLTISS | SGSGTDF | KHKVYACE |
| | RFTISR | EVHNAKTKPREEQYN | | TLYLQMN | | LQPEDFA | TLTISSL | VTHQGLSS |
| | DNSKNT | STYRVVSVLTVLHQD | | SLRAEDT | | TYYCQQY | QAEDVAV | PVTKSFNR |
| | LYLQMN | WLNGKEYKCKVSNKA | | AVYYCAR | | KSYPVTF | YYCQQYY | GEC (SEQ |
| | SLRAED | LPAPIEKTISKAKGQ | | DRPYYYY | | GQGTKVE | TTPPTFG | ID NO: |
| | TAVYYC | PREPQVYTLPPSREE | | MDVWGKG | | IK (SEQ | QGTRLEI | 45) |
| | ARGRGG | MTKNQVSLTCLVKGF | | TTVTVSS | | ID NO: | K (SEQ | |
| | SGWLDY | YPSDIAVEWESNGQP | | (SEQ ID | | 1367) | ID NO: | |
| | WGQGTL | ENNYKTTPPVLDSDG | | NO: | | | 1359) | |
| | VTVSS | SFFLYSKLTVDKSRW | | 1439) | | | | |
| | (SEQ | QQGNVFSCSVMHEAL | | | | | | |
| | ID NO: | HNHYTQKSLSLSPG | | | | | | |
| | 1438) | (SEQ ID NO: 44) | | | | | | |
| PMAB4 | EVQLLE | ASTKGPSVFPLAPSS | GGGGSG | EVQLLES | GGGGSG | DIQMTQS | DIVMTQS | RTVAAPSV |
| | SGGGLV | KSTSGGTAALGCLVK | GGGSGG | GGGLVQP | GGGSGG | PSSLSAS | PDSLAVS | FIFPPSDE |
| | QPGGSL | DYFPEPVTVSWNSGA | GGS | GGSLRLS | GGSGGG | VGDRVTI | LGERATI | QLKSGTAS |
| | RLSCAA | LTSGVHTFPAVLQSS | (SEQ | CAASGFT | GS | TCRASQS | NCKSSQS | VVCLLNNF |
| | SGFTFS | GLYSLSSVVTVPSSS | ID NO: | FSSYWMH | (SEQ | ISRSLAW | VLYSPNN | YPREAKVQ |
| | NSDMSW | LGTQTYICNVNHKPS | 30) | WVRQAPG | ID NO: | YQQKPGK | KNYLAWY | WKVDNALQ |
| | VRQAPG | NTKVDKKVEPKSCDK | | KGLEWVS | 22) | APKLLIY | QQKPGQP | SGNSQESV |
| | KGLEWV | THTCPPCPAPEAAGA | | AISGSSG | | AASSLQS | PKLLIYW | TEQDSKDS |
| | SGITIS | PSVFLFPPKPKDTLM | | STYYADS | | GVPSRFS | ASTRESG | TYSLSSTL |
| | GGSTYY | ISRTPEVTCVVVDVS | | VKGRFTI | | GSGSGTD | VPDRFSG | TLSKADYE |
| | ADSVKG | HEDPEVKFNWYVDGV | | SRDNSKN | | FTLTISS | SGSGTDF | KHKVYACE |
| | RFTISR | EVHNAKTKPREEQYN | | TLYLQMN | | LQPEDFA | TLTISSL | VTHQGLSS |
| | DNSKNT | STYRVVSVLTVLHQD | | SLRAEDT | | TYYCQQY | QAEDVAV | PVTKSFNR |
| | LYLQMN | WLNGKEYKCKVSNKA | | AVYYCAR | | KSYPVTF | YYCQQYY | GEC (SEQ |
| | SLRAED | LPAPIEKTISKAKGQ | | DRPYGYY | | GQGTKVE | TTPPTFG | ID NO: |
| | TAVYYC | PREPQVYTLPPSREE | | MDVWGKG | | IK (SEQ | QGTRLEI | 45) |
| | ARGRGG | MTKNQVSLTCLVKGF | | TTVTVSS | | ID NO: | K (SEQ | |
| | SGWLDY | YPSDIAVEWESNGQP | | (SEQ ID | | 1363) | ID NO: | |
| | WGQGTL | ENNYKTTPPVLDSDG | | NO: | | | 1359) | |
| | VTVSS | SFFLYSKLTVDKSRW | | 1347) | | | | |
| | (SEQ | QQGNVFSCSVMHEAL | | | | | | |
| | ID NO: | HNHYTQKSLSLSPG | | | | | | |
| | 1438) | (SEQ ID NO: 44) | | | | | | |
| PMAB5 | EVQLLE | ASTKGPSVFPLAPSS | GGGGSG | EVQLLES | GGGGSG | DIQMTQS | DIVMTQS | RTVAAPSV |
| | SGGGLV | KSTSGGTAALGCLVK | GGGSGG | GGGLVQP | GGGSGG | PSSLSAS | PDSLAVS | FIFPPSDE |
| | QPGGSL | DYFPEPVTVSWNSGA | GGS | GGSLRLS | GGSGGG | VGDRVTI | LGERATI | QLKSGTAS |
| | RLSCAA | LTSGVHTFPAVLQSS | (SEQ | CAASGFT | GS | TCRASQS | NCKSSQS | VVCLLNNF |
| | SGFTFS | GLYSLSSVVTVPSSS | ID NO: | FSSYWMH | (SEQ | ISRSLAW | VLYSPNN | YPREAKVQ |
| | NSDMSW | LGTQTYICNVNHKPS | 30) | WVRQAPG | ID NO: | YQQKPGK | KNYLAWY | WKVDNALQ |
| | VRQAPG | NTKVDKKVEPKSCDK | | KGLEWVS | 22) | APKLLIY | QQKPGQP | SGNSQESV |
| | KGLEWV | THTCPPCPAPEAAGA | | AISGSSG | | AASSLQS | PKLLIYW | TEQDSKDS |
| | SGITIS | PSVFLFPPKPKDTLM | | STYYADS | | GVPSRFS | ASTRESG | TYSLSSTL |
| | GGSTYY | ISRTPEVTCVVVDVS | | VKGRFTI | | GSGSGTD | VPDRFSG | TLSKADYE |
| | ADSVKG | HEDPEVKFNWYVDGV | | SRDNSKN | | FTLTISS | SGSGTDF | KHKVYACE |
| | RFTISR | EVHNAKTKPREEQYN | | TLYLQMN | | LQPEDFA | TLTISSL | VTHQGLSS |
| | DNSKNT | STYRVVSVLTVLHQD | | SLRAEDT | | TYYCQQY | QAEDVAV | PVTKSFNR |
| | LYLQMN | WLNGKEYKCKVSNKA | | AVYYCAR | | KSYPVTF | YYCQQYY | GEC (SEQ |
| | SLRAED | LPAPIEKTISKAKGQ | | DRPYYYY | | GQGTKVE | TTPPTFG | ID NO: |
| | TAVYYC | PREPQVYTLPPSREE | | MDVWGKG | | IK (SEQ | QGTRLEI | 45) |
| | ARGRGG | MTKNQVSLTCLVKGF | | TTVTVSS | | ID NO: | K (SEQ | |
| | SGWLDY | YPSDIAVEWESNGQP | | (SEQ ID | | 1363) | ID NO: | |
| | WGQGTL | ENNYKTTPPVLDSDG | | NO: | | | 1359) | |
| | VTVSS | SFFLYSKLTVDKSRW | | 1439) | | | | |
| | (SEQ | QQGNVFSCSVMHEAL | | | | | | |
| | ID NO: | HNHYTQKSLSLSPG | | | | | | |
| | 1438) | (SEQ ID NO: 44) | | | | | | |
| PMAB6 | EVQLLE | ASTKGPSVFPLAPSS | GGGGSG | EVQLLES | GGGGSG | DIQMTQS | DIVMTQS | RTVAAPSV |
| | SGGGLV | KSTSGGTAALGCLVK | GGGSGG | GGGLVQP | GGGSGG | PSSLSAS | PDSLAVS | FIFPPSDE |
| | QPGGSL | DYFPEPVTVSWNSGA | GGS | GGSLRLS | GGSGGG | VGDRVTI | LGERATI | QLKSGTAS |
| | RLSCAA | LTSGVHTFPAVLQSS | (SEQ | CAASGFT | GS | TCRASQS | NCKSSQS | VVCLLNNF |
| | SGFTFS | GLYSLSSVVTVPSSS | ID NO: | FSSYWMH | (SEQ | ISSSLAW | VLYSPNN | YPREAKVQ |
| | NSDMSW | LGTQTYICNVNHKPS | 30) | WVRQAPG | ID NO: | YQQKPGK | KNYLAWY | WKVDNALQ |
| | VRQAPG | NTKVDKKVEPKSCDK | | KGLEWIS | 22) | APKLLIY | QQKPGQP | SGNSQESV |
| | KGLEWV | THTCPPCPAPEAAGA | | AISGSGG | | AASSLQS | PKLLIYW | TEQDSKDS |
| | SGITIS | PSVFLFPPKPKDTLM | | STYYADS | | GVPSRFS | ASTRESG | TYSLSSTL |
| | GGSTYY | ISRTPEVTCVVVDVS | | VKGRFTI | | GSGSGTD | VPDRFSG | TLSKADYE |
| | ADSVKG | HEDPEVKFNWYVDGV | | SRDNSKN | | FTLTISS | SGSGTDF | KHKVYACE |
| | RFTISR | EVHNAKTKPREEQYN | | TLYLQMN | | LQPEDFA | TLTISSL | VTHQGLSS |
| | DNSKNT | STYRVVSVLTVLHQD | | SLRAEDT | | TYYCQQY | QAEDVAV | PVTKSFNR |
| | LYLQMN | WLNGKEYKCKVSNKA | | AVYYCAR | | KSYPVTF | YYCQQYY | GEC (SEQ |
| | SLRAED | LPAPIEKTISKAKGQ | | DRPYGYY | | GQGTKVE | TTPPTFG | ID NO: |
| | TAVYYC | PREPQVYTLPPSREE | | MDVWGKG | | IK (SEQ | QGTRLEI | 45) |
| | ARGRGG | MTKNQVSLTCLVKGF | | TTVTVSS | | ID NO: | K (SEQ | |
| | SGWLDY | YPSDIAVEWESNGQP | | (SEQ ID | | 1367) | ID NO: | |
| | WGQGTL | ENNYKTTPPVLDSDG | | NO: | | | 1359) | |
| | VTVSS | SFFLYSKLTVDKSRW | | 1440) | | | | |
| | (SEQ | QQGNVFSCSVMHEAL | | | | | | |
| | ID NO: | HNHYTQKSLSLSPG | | | | | | |
| | 1438) | (SEQ ID NO: 44) | | | | | | |
| PMAB7 | EVQLLE | ASTKGPSVFPLAPSS | GGGGSG | EVQLLES | GGGGSG | DIQMTQS | DIVMTQS | RTVAAPSV |
| | SGGGLV | KSTSGGTAALGCLVK | GGGSGG | GGGLVQP | GGGSGG | PSSLSAS | PDSLAVS | FIFPPSDE |
| | QPGGSL | DYFPEPVTVSWNSGA | GGS | GGSLRLS | GGSGGG | VGDRVTI | LGERATI | QLKSGTAS |
| | RLSCAA | LTSGVHTFPAVLQSS | (SEQ | CAASGFT | GS | TCRASQS | NCKSSQS | VVCLLNNF |
| | SGFTFS | GLYSLSSVVTVPSSS | ID NO: | FSSYWMH | (SEQ | ISSSLAW | VLYSPNN | YPREAKVQ |
| | NSDMSW | LGTQTYICNVNHKPS | 30) | WVRQAPG | ID NO: | YQQKPGK | KNYLAWY | WKVDNALQ |
| | VRQAPG | NTKVDKKVEPKSCDK | | KGLEWIS | 22) | APKLLIY | QQKPGQP | SGNSQESV |
| | KGLEWV | THTCPPCPAPEAAGA | | AISGSGG | | AASSLQS | PKLLIYW | TEQDSKDS |
| | SGITIS | PSVFLFPPKPKDTLM | | STYYADS | | GVPSRFS | ASTRESG | TYSLSSTL |
| | GGSTYY | ISRTPEVTCVVVDVS | | VKGRFTI | | GSGSGTD | VPDRFSG | TLSKADYE |
| | ADSVKG | HEDPEVKFNWYVDGV | | SRDNSKN | | FTLTISS | SGSGTDF | KHKVYACE |
| | RFTISR | EVHNAKTKPREEQYN | | TLYLQMN | | LQPEDFA | TLTISSL | VTHQGLSS |
| | DNSKNT | STYRVVSVLTVLHQD | | SLRAEDT | | TYYCQQY | QAEDVAV | PVTKSFNR |
| | LYLQMN | WLNGKEYKCKVSNKA | | AVYYCAR | | KSYPVTF | YYCQQYY | GEC (SEQ |
| | SLRAED | LPAPIEKTISKAKGQ | | DRPYYYY | | GQGTKVE | TTPPTFG | ID NO: |
| | TAVYYC | PREPQVYTLPPSREE | | MDVWGKG | | IK (SEQ | QGTRLEI | 45) |
| | ARGRGG | MTKNQVSLTCLVKGF | | TTVTVSS | | ID NO: | K (SEQ | |
| | SGWLDY | YPSDIAVEWESNGQP | | (SEQ ID | | 1367) | ID NO: | |
| | WGQGTL | ENNYKTTPPVLDSDG | | NO: | | | 1359) | |
| | VTVSS | SFFLYSKLTVDKSRW | | 1441) | | | | |
| | (SEQ | QQGNVFSCSVMHEAL | | | | | | |
| | ID NO: | HNHYTQKSLSLSPG | | | | | | |
| | 1438) | (SEQ ID NO: 44) | | | | | | |
| PMAB8 | EVQLLE | ASTKGPSVFPLAPSS | GGGGSG | EVQLLES | GGGGSG | DIQMTQS | DIVMTQS | RTVAAPSV |
| | SGGGLV | KSTSGGTAALGCLVK | GGGSGG | GGGLVQP | GGGSGG | PSSLSAS | PDSLAVS | FIFPPSDE |
| | QPGGSL | DYFPEPVTVSWNSGA | GGS | GGSLRLS | GGSGGG | VGDRVTI | LGERATI | QLKSGTAS |
| | RLSCAA | LTSGVHTFPAVLQSS | (SEQ | CAASGFT | GS | TCRASQS | NCKSSQS | VVCLLNNF |
| | SGFTFS | GLYSLSSVVTVPSSS | ID NO: | FSSYWMH | (SEQ | ISRSLAW | VLYSPNN | YPREAKVQ |
| | NSDMSW | LGTQTYICNVNHKPS | 30) | WVRQAPG | ID NO: | YQQKPGK | KNYLAWY | WKVDNALQ |
| | VRQAPG | NTKVDKKVEPKSCDK | | KGLEWIS | 22) | APKLLIY | QQKPGQP | SGNSQESV |
| | KGLEWV | THTCPPCPAPEAAGA | | AISGSGG | | AASSLQS | PKLLIYW | TEQDSKDS |
| | SGITIS | PSVFLFPPKPKDTLM | | STYYADS | | GVPSRFS | ASTRESG | TYSLSSTL |
| | GGSTYY | ISRTPEVTCVVVDVS | | VKGRFTI | | GSGSGTD | VPDRFSG | TLSKADYE |
| | ADSVKG | HEDPEVKFNWYVDGV | | SRDNSKN | | FTLTISS | SGSGTDF | KHKVYACE |
| | RFTISR | EVHNAKTKPREEQYN | | TLYLQMN | | LQPEDFA | TLTISSL | VTHQGLSS |
| | DNSKNT | STYRVVSVLTVLHQD | | SLRAEDT | | TYYCQQY | QAEDVAV | PVTKSFNR |
| | LYLQMN | WLNGKEYKCKVSNKA | | AVYYCAR | | KSYPVTF | YYCQQYY | GEC (SEQ |
| | SLRAED | LPAPIEKTISKAKGQ | | DRPYGYY | | GQGTKVE | TTPPTFG | ID NO: |
| | TAVYYC | PREPQVYTLPPSREE | | MDVWGKG | | IK (SEQ | QGTRLEI | 45) |
| | ARGRGG | MTKNQVSLTCLVKGF | | TTVTVSS | | ID NO: | K (SEQ | |
| | SGWLDY | YPSDIAVEWESNGQP | | (SEQ ID | | 1363) | ID NO: | |
| | WGQGTL | ENNYKTTPPVLDSDG | | NO: | | | | |
| | VTVSS | SFFLYSKLTVDKSRW | | | | | | |
| | (SEQ | QQGNVFSCSVMHEAL | | 1440) | | | 1359) | |
| | ID NO: | HNHYTQKSLSLSPG | | | | | | |
| | 1438) | (SEQ ID NO: 44) | | | | | | |
| PMAB9 | EVQLLE | ASTKGPSVFPLAPSS | GGGGSG | EVQLLES | GGGGSG | DIQMTQS | DIVMTQS | RTVAAPSV |
| | SGGGLV | KSTSGGTAALGCLVK | GGGSGG | GGGLVQP | GGGSGG | PSSLSAS | PDSLAVS | FIFPPSDE |
| | QPGGSL | DYFPEPVTVSWNSGA | GGS | GGSLRLS | GGSGGG | VGDRVTI | LGERATI | QLKSGTAS |
| | RLSCAA | LTSGVHTFPAVLQSS | (SEQ | CAASGFT | GS | TCRASQS | NCKSSQS | VVCLLNNF |
| | SGFTFS | GLYSLSSVVTVPSSS | ID NO: | FSSYWMH | (SEQ | ISRSLAW | VLYSPNN | YPREAKVQ |
| | NSDMSW | LGTQTYICNVNHKPS | 30) | WVRQAPG | ID NO: | YQQKPGK | KNYLAWY | WKVDNALQ |
| | VRQAPG | NTKVDKKVEPKSCDK | | KGLEWIS | 22) | APKLLIY | QQKPGQP | SGNSQESV |
| | KGLEWV | THTCPPCPAPEAAGA | | AISGSGG | | AASSLQS | PKLLIYW | TEQDSKDS |
| | SGITIS | PSVFLFPPKPKDTLM | | STYYADS | | GVPSRFS | ASTRESG | TYSLSSTL |
| | GGSTYY | ISRTPEVTCVVVDVS | | VKGRFTI | | GSGSGTD | VPDRFSG | TLSKADYE |
| | ADSVKG | HEDPEVKFNWYVDGV | | SRDNSKN | | FTLTISS | SGSGTDF | KHKVYACE |
| | RFTISR | EVHNAKTKPREEQYN | | TLYLQMN | | LQPEDFA | TLTISSL | VTHQGLSS |
| | DNSKNT | STYRVVSVLTVLHQD | | SLRAEDT | | TYYCQQY | QAEDVAV | PVTKSFNR |
| | LYLQMN | WLNGKEYKCKVSNKA | | AVYYCAR | | KSYPVTF | YYCQQYY | GEC (SEQ |
| | SLRAED | LPAPIEKTISKAKGQ | | DRPYYYY | | GQGTKVE | TTPPTFG | ID NO: |
| | TAVYYC | PREPQVYTLPPSREE | | MDVWGKG | | IK (SEQ | QGTRLEI | 45) |
| | ARGRGG | MTKNQVSLTCLVKGF | | TTVTVSS | | ID NO: | K (SEQ | |
| | SGWLDY | YPSDIAVEWESNGQP | | (SEQ ID | | 1363) | ID NO: | |
| | WGQGTL | ENNYKTTPPVLDSDG | | NO: | | | 1359) | |
| | VTVSS | SFFLYSKLTVDKSRW | | 1441) | | | | |
| | (SEQ | QQGNVFSCSVMHEAL | | | | | | |
| | ID NO: | HNHYTQKSLSLSPG | | | | | | |
| | 1438) | (SEQ ID NO: 44) | | | | | | |
| PMAB10 | EVQLLE | ASTKGPSVFPLAPSS | GGGGSG | EVQLLES | GGGGSG | DIQMTQS | DIVMTQS | RTVAAPSV |
| | SGGGLV | KSTSGGTAALGCLVK | GGGSGG | GGGLVQP | GGGSGG | PSSLSAS | PDSLAVS | FIFPPSDE |
| | QPGGSL | DYFPEPVTVSWNSGA | GGS | GGSLRLS | GGSGGG | VGDRVTI | LGERATI | QLKSGTAS |
| | RLSCAA | LTSGVHTFPAVLQSS | (SEQ | CAASGFT | GS | TCRASQS | NCKSSQS | VVCLLNNF |
| | SGFTFS | GLYSLSSVVTVPSSS | ID NO: | FSSYWMH | (SEQ | ISSSLAW | VLYSPNN | YPREAKVQ |
| | NSDMSW | LGTQTYICNVNHKPS | 30) | WVRQAPG | ID NO: | YQQKPGK | KNYLAWY | WKVDNALQ |
| | VRQAPG | NTKVDKKVEPKSCDK | | KGLEWVS | 22) | APKLLIY | QQKPGQP | SGNSQESV |
| | KGLEWV | THTCPPCPAPEAAGA | | AISGSGG | | AASSLQS | PKLLIYW | TEQDSKDS |
| | SGITIS | PSVFLFPPKPKDTLM | | STYYADS | | GVPSRFS | ASTRESG | TYSLSSTL |
| | GGSTYY | ISRTPEVTCVVVDVS | | VKGRFTI | | GSGSGTD | VPDRFSG | TLSKADYE |
| | ADSVKG | HEDPEVKENWYVDGV | | SRDNSKN | | FTLTISS | SGSGTDF | KHKVYACE |
| | RFTISR | EVHNAKTKPREEQYN | | TLYLQMN | | LQPEDFA | TLTISSL | VTHQGLSS |
| | DNSKNT | STYRVVSVLTVLHQD | | SLRAEDT | | TYYCQQY | QAEDVAV | PVTKSFNR |
| | LYLQMN | WLNGKEYKCKVSNKA | | AVYYCAR | | KSYPVTF | YYCQQYY | GEC (SEQ |
| | SLRAED | LPAPIEKTISKAKGQ | | DRPYGYY | | GQGTKVE | TTPPTFG | ID NO: |
| | TAVYYC | PREPQVYTLPPSREE | | MDVWGKG | | IK (SEQ | QGTRLEI | 45) |
| | ARGRGG | MTKNQVSLTCLVKGF | | TTVTVSS | | ID NO: | K (SEQ | |
| | SGWLDY | YPSDIAVEWESNGQP | | (SEQ ID | | 1367) | ID NO: | |
| | WGQGTL | ENNYKTTPPVLDSDG | | NO: | | | 1359) | |
| | VTVSS | SFFLYSKLTVDKSRW | | 1442) | | | | |
| | (SEQ | QQGNVFSCSVMHEAL | | | | | | |
| | ID NO: | HNHYTQKSLSLSPG | | | | | | |
| | 1438) | (SEQ ID NO: 44) | | | | | | |
| PMAB11 | EVQLLE | ASTKGPSVFPLAPSS | GGGGSG | EVQLLES | GGGGSG | DIQMTQS | DIVMTQS | RTVAAPSV |
| | SGGGLV | KSTSGGTAALGCLVK | GGGSGG | GGGLVQP | GGGSGG | PSSLSAS | PDSLAVS | FIFPPSDE |
| | QPGGSL | DYFPEPVTVSWNSGA | GGS | GGSLRLS | GGSGGG | VGDRVTI | LGERATI | QLKSGTAS |
| | RLSCAA | LTSGVHTFPAVLQSS | (SEQ | CAASGFT | GS | TCRASQS | NCKSSQS | VVCLLNNF |
| | SGFTFS | GLYSLSSVVTVPSSS | ID NO: | FSSYWMH | (SEQ | ISSSLAW | VLYSPNN | YPREAKVQ |
| | NSDMSW | LGTQTYICNVNHKPS | 30) | WVRQAPG | ID NO: | YQQKPGK | KNYLAWY | WKVDNALQ |
| | VRQAPG | NTKVDKKVEPKSCDK | | KGLEWVS | 22) | APKLLIY | QQKPGQP | SGNSQESV |
| | KGLEWV | THTCPPCPAPEAAGA | | AISGSGG | | AASSLQS | PKLLIYW | TEQDSKDS |
| | SGITIS | PSVFLFPPKPKDTLM | | STYYADS | | GVPSRFS | ASTRESG | TYSLSSTL |
| | GGSTYY | ISRTPEVTCVVVDVS | | VKGRFTI | | GSGSGTD | VPDRFSG | TLSKADYE |
| | ADSVKG | HEDPEVKENWYVDGV | | SRDNSKN | | FTLTISS | SGSGTDF | KHKVYACE |
| | RFTISR | EVHNAKTKPREEQYN | | TLYLQMN | | LQPEDFA | TLTISSL | VTHQGLSS |
| | DNSKNT | STYRVVSVLTVLHQD | | SLRAEDT | | TYYCQQY | QAEDVAV | PVTKSFNR |
| | LYLQMN | WLNGKEYKCKVSNKA | | AVYYCAR | | KSYPVTF | YYCQQYY | GEC (SEQ |
| | SLRAED | LPAPIEKTISKAKGQ | | DRPYYYY | | GQGTKVE | TTPPTFG | ID NO: |
| | TAVYYC | PREPQVYTLPPSREE | | MDVWGKG | | IK (SEQ | QGTRLEI | 45) |
| | ARGRGG | MTKNQVSLTCLVKGF | | TTVTVSS | | ID NO: | K (SEQ | |
| | SGWLDY | YPSDIAVEWESNGQP | | (SEQ ID | | 1367) | ID NO: | |
| | WGQGTL | ENNYKTTPPVLDSDG | | NO: | | | 1359) | |
| | VTVSS | SFFLYSKLTVDKSRW | | 1395) | | | | |
| | (SEQ | QQGNVFSCSVMHEAL | | | | | | |
| | ID NO: | HNHYTQKSLSLSPG | | | | | | |
| | 1438) | (SEQ ID NO: 44) | | | | | | |
| PMAB12 | EVQLLE | ASTKGPSVFPLAPSS | GGGGSG | EVQLLES | GGGGSG | DIQMTQS | DIVMTQS | RTVAAPSV |
| | SGGGLV | KSTSGGTAALGCLVK | GGGSGG | GGGLVQP | GGGSGG | PSSLSAS | PDSLAVS | FIFPPSDE |
| | QPGGSL | DYFPEPVTVSWNSGA | GGS | GGSLRLS | GGSGGG | VGDRVTI | LGERATI | QLKSGTAS |
| | RLSCAA | LTSGVHTFPAVLQSS | (SEQ | CAASGFT | GS | TCRASQS | NCKSSQS | VVCLLNNF |
| | SGFTFS | GLYSLSSVVTVPSSS | ID NO: | FSSYWMH | (SEQ | ISRSLAW | VLYSPNN | YPREAKVQ |
| | NSDMSW | LGTQTYICNVNHKPS | 30) | WVRQAPG | ID NO: | YQQKPGK | KNYLAWY | WKVDNALQ |
| | VRQAPG | NTKVDKKVEPKSCDK | | KGLEWVS | 22) | APKLLIY | QQKPGQP | SGNSQESV |
| | KGLEWV | THTCPPCPAPEAAGA | | AISGSGG | | AASSLQS | PKLLIYW | TEQDSKDS |
| | SGITIS | PSVFLFPPKPKDTLM | | STYYADS | | GVPSRFS | ASTRESG | TYSLSSTL |
| | GGSTYY | ISRTPEVTCVVVDVS | | VKGRFTI | | GSGSGTD | VPDRFSG | TLSKADYE |
| | ADSVKG | HEDPEVKENWYVDGV | | SRDNSKN | | FTLTISS | SGSGTDF | KHKVYACE |
| | RFTISR | EVHNAKTKPREEQYN | | TLYLQMN | | LQPEDFA | TLTISSL | VTHQGLSS |
| | DNSKNT | STYRVVSVLTVLHQD | | SLRAEDT | | TYYCQQY | QAEDVAV | PVTKSFNR |
| | LYLQMN | WLNGKEYKCKVSNKA | | AVYYCAR | | KSYPVTF | YYCQQYY | GEC (SEQ |
| | SLRAED | LPAPIEKTISKAKGQ | | DRPYGYY | | GQGTKVE | TTPPTFG | ID NO: |
| | TAVYYC | PREPQVYTLPPSREE | | MDVWGKG | | IK (SEQ | QGTRLEI | 45) |
| | ARGRGG | MTKNQVSLTCLVKGF | | TTVTVSS | | ID NO: | K (SEQ | |
| | SGWLDY | YPSDIAVEWESNGQP | | (SEQ ID | | 1363) | ID NO: | |
| | WGQGTL | ENNYKTTPPVLDSDG | | NO: | | | 1359) | |
| | VTVSS | SFFLYSKLTVDKSRW | | 1442) | | | | |
| | (SEQ | QQGNVFSCSVMHEAL | | | | | | |
| | ID NO: | HNHYTQKSLSLSPG | | | | | | |
| | 1438) | (SEQ ID NO: 44) | | | | | | |
| PMAB13 | EVQLLE | ASTKGPSVFPLAPSS | GGGGSG | EVQLLES | GGGGSG | DIQMTQS | DIVMTQS | RTVAAPSV |
| | SGGGLV | KSTSGGTAALGCLVK | GGGSGG | GGGLVQP | GGGSGG | PSSLSAS | PDSLAVS | FIFPPSDE |
| | QPGGSL | DYFPEPVTVSWNSGA | GGS | GGSLRLS | GGSGGG | VGDRVTI | LGERATI | QLKSGTAS |
| | RLSCAA | LTSGVHTFPAVLQSS | (SEQ | CAASGFT | GS | TCRASQS | NCKSSQS | VVCLLNNF |
| | SGFTFS | GLYSLSSVVTVPSSS | ID NO: | FSSYWMH | (SEQ | ISRSLAW | VLYSPNN | YPREAKVQ |
| | NSDMSW | LGTQTYICNVNHKPS | 30) | WVRQAPG | ID NO: | YQQKPGK | KNYLAWY | WKVDNALQ |
| | VRQAPG | NTKVDKKVEPKSCDK | | KGLEWVS | 22) | APKLLIY | QQKPGQP | SGNSQESV |
| | KGLEWV | THTCPPCPAPEAAGA | | AISGSGG | | AASSLQS | PKLLIYW | TEQDSKDS |
| | SGITIS | PSVFLFPPKPKDTLM | | STYYADS | | GVPSRFS | ASTRESG | TYSLSSTL |
| | GGSTYY | ISRTPEVTCVVVDVS | | VKGRFTI | | GSGSGTD | VPDRFSG | TLSKADYE |
| | ADSVKG | HEDPEVKFNWYVDGV | | SRDNSKN | | FTLTISS | SGSGTDF | KHKVYACE |
| | RFTISR | EVHNAKTKPREEQYN | | TLYLQMN | | LQPEDFA | TLTISSL | VTHQGLSS |
| | DNSKNT | STYRVVSVLTVLHQD | | SLRAEDT | | TYYCQQY | QAEDVAV | PVTKSFNR |
| | LYLQMN | WLNGKEYKCKVSNKA | | AVYYCAR | | KSYPVTF | YYCQQYY | GEC (SEQ |
| | SLRAED | LPAPIEKTISKAKGQ | | DRPYYYY | | GQGTKVE | TTPPTFG | ID NO: |
| | TAVYYC | PREPQVYTLPPSREE | | MDVWGKG | | IK (SEQ | QGTRLEI | 45) |
| | ARGRGG | MTKNQVSLTCLVKGF | | TTVTVSS | | ID NO: | K (SEQ | |
| | SGWLDY | YPSDIAVEWESNGQP | | (SEQ ID | | 1363) | ID NO: | |
| | WGQGTL | ENNYKTTPPVLDSDG | | NO: | | | 1359) | |
| | VTVSS | SFFLYSKLTVDKSRW | | 1395) | | | | |
| | (SEQ | QQGNVFSCSVMHEAL | | | | | | |
| | ID NO: | HNHYTQKSLSLSPG | | | | | | |
| | 1438) | (SEQ ID NO: 44) | | | | | | |
| PMAB14 | EVQLLE | ASTKGPSVFPLAPSS | GGGGSG | EVQLLES | GGGGSG | DIQMTQS | DIVMTQS | RTVAAPSV |
| | SGGGLV | KSTSGGTAALGCLVK | GGGSGG | GGGLVQP | GGGSGG | PSSLSAS | PDSLAVS | FIFPPSDE |
| | QPGGSL | DYFPEPVTVSWNSGA | GGS | GGSLRLS | GGSGGG | VGDRVTI | LGERATI | QLKSGTAS |
| | RLSCAA | LTSGVHTFPAVLQSS | (SEQ | CAASGFT | GS | TCRASQS | NCKSSQS | VVCLLNNF |
| | SGFTFS | GLYSLSSVVTVPSSS | ID NO: | FSSYWMH | (SEQ | ISSSLAW | VLYSPNN | YPREAKVQ |
| | NSDMSW | LGTQTYICNVNHKPS | 30) | WVRQAPG | ID NO: | YQQKPGK | KNYLAWY | WKVDNALQ |
| | VRQAPG | NTKVDKKVEPKSCDK | | KGLEWVS | 22) | APKLLIY | QQKPGQP | SGNSQESV |
| | KGLEWV | THTCPPCPAPEAAGA | | YISGSGG | | AASSLQS | PKLLIYW | TEQDSKDS |
| | SGITIS | PSVFLFPPKPKDTLM | | YTNYADS | | GVPSRFS | ASTRESG | TYSLSSTL |
| | GGSTYY | ISRTPEVTCVVVDVS | | VKGRFTI | | GSGSGTD | VPDRFSG | TLSKADYE |
| | ADSVKG | HEDPEVKFNWYVDGV | | SRDNSKN | | FTLTISS | SGSGTDF | KHKVYACE |
| | RFTISR | EVHNAKTKPREEQYN | | TLYLQMN | | LQPEDFA | TLTISSL | VTHQGLSS |
| | DNSKNT | STYRVVSVLTVLHQD | | SLRAEDT | | TYYCQQY | QAEDVAV | PVTKSFNR |
| | LYLQMN | WLNGKEYKCKVSNKA | | AVYYCAR | | KSYPVTF | YYCQQYY | GEC (SEQ |
| | SLRAED | LPAPIEKTISKAKGQ | | DRPYGYY | | GQGTKVE | TTPPTFG | ID NO: |
| | TAVYYC | PREPQVYTLPPSREE | | MDVWGKG | | IK (SEQ | QGTRLEI | 45) |
| | ARGRGG | MTKNQVSLTCLVKGF | | TTVTVSS | | ID NO: | K (SEQ | |
| | SGWLDY | YPSDIAVEWESNGQP | | (SEQ ID | | 1367) | ID NO: | |
| | WGQGTL | ENNYKTTPPVLDSDG | | NO: | | | 1359) | |
| | VTVSS | SFFLYSKLTVDKSRW | | 1443) | | | | |
| | (SEQ | QQGNVFSCSVMHEAL | | | | | | |
| | ID NO: | HNHYTQKSLSLSPG | | | | | | |
| | 1438) | (SEQ ID NO: 44) | | | | | | |
| PMAB15 | EVQLLE | ASTKGPSVFPLAPSS | GGGGSG | EVQLLES | GGGGSG | DIQMTQS | DIVMTQS | RTVAAPSV |
| | SGGGLV | KSTSGGTAALGCLVK | GGGSGG | GGGLVQP | GGGSGG | PSSLSAS | PDSLAVS | FIFPPSDE |
| | QPGGSL | DYFPEPVTVSWNSGA | GGS | GGSLRLS | GGSGGG | VGDRVTI | LGERATI | QLKSGTAS |
| | RLSCAA | LTSGVHTFPAVLQSS | (SEQ | CAASGFT | GS | TCRASQS | NCKSSQS | VVCLLNNF |
| | SGFTFS | GLYSLSSVVTVPSSS | ID NO: | FSSYWMH | (SEQ | ISSSLAW | VLYSPNN | YPREAKVQ |
| | SYDMSW | LGTQTYICNVNHKPS | 30) | WVRQAPG | ID NO: | YQQKPGK | KNYLAWY | WKVDNALQ |
| | VRQAPG | NTKVDKKVEPKSCDK | | KGLEWVS | 22) | APKLLIY | QQKPGQP | SGNSQESV |
| | KGLEWV | THTCPPCPAPEAAGA | | AISGSGG | | AASSLQS | PKLLIYW | TEQDSKDS |
| | SGITIS | PSVFLFPPKPKDTLM | | STYYADS | | GVPSRFS | ASTRESG | TYSLSSTL |
| | GGSTYY | ISRTPEVTCVVVDVS | | VKGRFTI | | GSGSGTD | VPDRFSG | TLSKADYE |
| | ADSVKG | HEDPEVKFNWYVDGV | | SRDNSKN | | FTLTISS | SGSGTDF | KHKVYACE |
| | RFTISR | EVHNAKTKPREEQYN | | TLYLQMN | | LQPEDFA | TLTISSL | VTHQGLSS |
| | DNSKNT | STYRVVSVLTVLHQD | | SLRAEDT | | TYYCQQY | QAEDVAV | PVTKSFNR |
| | LYLQMN | WLNGKEYKCKVSNKA | | AVYYCAR | | KSYPVTF | YYCQQYY | GEC (SEQ |
| | SLRAED | LPAPIEKTISKAKGQ | | DRPYYYD | | GQGTKVE | TTPPTFG | ID NO: |
| | TAVYYC | PREPQVYTLPPSREE | | MDVWGKG | | IK (SEQ | QGTRLEI | 45) |
| | ARGRGG | MTKNQVSLTCLVKGF | | TTVTVSS | | ID NO: | K (SEQ | |
| | SGWLDY | YPSDIAVEWESNGQP | | (SEQ ID | | 1367) | ID NO: | |
| | WGQGTL | ENNYKTTPPVLDSDG | | NO: | | | 1359) | |
| | VTVSS | SFFLYSKLTVDKSRW | | 1444) | | | | |
| | (SEQ | QQGNVFSCSVMHEAL | | | | | | |
| | ID NO: | HNHYTQKSLSLSPG | | | | | | |
| | 1446) | (SEQ ID NO: 44) | | | | | | |
| PMAB16 | EVQLLE | ASTKGPSVFPLAPSS | GGGGSG | EVQLLES | GGGGSG | DIQMTQS | DIVMTQS | RTVAAPSV |
| | SGGGLV | KSTSGGTAALGCLVK | GGGSGG | GGGLVQP | GGGSGG | PSSLSAS | PDSLAVS | FIFPPSDE |
| | QPGGSL | DYFPEPVTVSWNSGA | GGS | GGSLRLS | GGSGGG | VGDRVTI | LGERATI | QLKSGTAS |
| | RLSCAA | LTSGVHTFPAVLQSS | (SEQ | CAASGFT | GS | TCRASQS | NCKSSQS | VVCLLNNF |
| | SGFTFS | GLYSLSSVVTVPSSS | ID NO: | FSSYWMH | (SEQ | ISSSLAW | VLYSPNN | YPREAKVQ |
| | SYDMSW | LGTQTYICNVNHKPS | 30) | WVRQAPG | ID NO: | YQQKPGK | KNYLAWY | WKVDNALQ |
| | VRQAPG | NTKVDKKVEPKSCDK | | KGLEWVS | 22) | APKLLIY | QQKPGQP | SGNSQESV |
| | KGLEWV | THTCPPCPAPEAAGA | | YISGSGG | | AASSLQS | PKLLIYW | TEQDSKDS |
| | SGITIS | PSVFLFPPKPKDTLM | | YTNYADS | | GVPSRFS | ASTRESG | TYSLSSTL |
| | GGSTYY | ISRTPEVTCVVVDVS | | VKGRFTI | | GSGSGTD | VPDRFSG | TLSKADYE |
| | ADSVKG | HEDPEVKFNWYVDGV | | SRDNSKN | | FTLTISS | SGSGTDF | KHKVYACE |
| | RFTISR | EVHNAKTKPREEQYN | | TLYLQMN | | LQPEDFA | TLTISSL | VTHQGLSS |
| | DNSKNT | STYRVVSVLTVLHQD | | SLRAEDT | | TYYCQQY | QAEDVAV | PVTKSFNR |
| | LYLQMN | WLNGKEYKCKVSNKA | | AVYYCAR | | KSYPVTF | YYCQQYY | GEC (SEQ |
| | SLRAED | LPAPIEKTISKAKGQ | | DRPYYYD | | GQGTKVE | TTPPTFG | ID NO: |
| | TAVYYC | PREPQVYTLPPSREE | | MDVWGKG | | IK (SEQ | QGTRLEI | 45) |
| | ARGRGG | MTKNQVSLTCLVKGF | | TTVTVSS | | ID NO: | K (SEQ | |
| | SGWLDY | YPSDIAVEWESNGQP | | (SEQ ID | | 1367) | ID NO: | |
| | WGQGTL | ENNYKTTPPVLDSDG | | NO: | | | 1359) | |
| | VTVSS | SFFLYSKLTVDKSRW | | 1445) | | | | |
| | (SEQ | QQGNVFSCSVMHEAL | | | | | | |
| | ID NO: | HNHYTQKSLSLSPG | | | | | | |
| | 1446) | (SEQ ID NO: 44) | | | | | | |
| PMAB17 | EVQLLE | ASTKGPSVFPLAPSS | GGGGSG | EVQLLES | GGGGSG | DIQMTQS | DIVMTQS | RTVAAPSV |
| | SGGGLV | KSTSGGTAALGCLVK | GGGSGG | GGGLVQP | GGGSGG | PSSLSAS | PDSLAVS | FIFPPSDE |
| | QPGGSL | DYFPEPVTVSWNSGA | GGS | GGSLRLS | GGSGGG | VGDRVTI | LGERATI | QLKSGTAS |
| | RLSCAA | LTSGVHTFPAVLQSS | (SEQ | CAASGFT | GS | TCRASQS | NCKSSQS | VVCLLNNF |
| | SGFTFS | GLYSLSSVVTVPSSS | ID NO: | FSSYWMH | (SEQ | ISSSLAW | VLYSPNN | YPREAKVQ |
| | SYDMSW | LGTQTYICNVNHKPS | 30) | WVRQAPG | ID NO: | YQQKPGK | KNYLAWY | WKVDNALQ |
| | VRQAPG | NTKVDKKVEPKSCDK | | KGLEWVS | 22) | APKLLIY | QQKPGQP | SGNSQESV |
| | KGLEWV | THTCPPCPAPEAAGA | | AISGSGG | | AASSLQS | PKLLIYW | TEQDSKDS |
| | SGITIS | PSVFLFPPKPKDTLM | | STYYADS | | GVPSRFS | ASTRESG | TYSLSSTL |
| | GGSTYY | ISRTPEVTCVVVDVS | | VKGRFTI | | GSGSGTD | VPDRFSG | TLSKADYE |
| | ADSVKG | HEDPEVKFNWYVDGV | | SRDNSKN | | FTLTISS | SGSGTDF | KHKVYACE |
| | RFTISR | EVHNAKTKPREEQYN | | TLYLQMN | | LQPEDFA | TLTISSL | VTHQGLSS |
| | DNSKNT | STYRVVSVLTVLHQD | | SLRAEDT | | TYYCQQY | QAEDVAV | PVTKSFNR |
| | LYLQMN | WLNGKEYKCKVSNKA | | AVYYCAR | | KSYPVTF | YYCQQYY | GEC (SEQ |
| | SLRAED | LPAPIEKTISKAKGQ | | DRPYGYY | | GQGTKVE | TTPPTFG | ID NO: |
| | TAVYYC | PREPQVYTLPPSREE | | MDVWGKG | | IK (SEQ | QGTRLEI | 45) |
| | ARGRGG | MTKNQVSLTCLVKGF | | TTVTVSS | | ID NO: | K (SEQ | |
| | SGWLDY | YPSDIAVEWESNGQP | | (SEQ ID | | 1367) | ID NO: | |
| | WGQGTD | ENNYKTTPPVLDSDG | | NO: | | | 1359) | |
| | VTVSS | SFFLYSKLTVDKSRW | | 1442) | | | | |
| | (SEQ | QQGNVFSCSVMHEAL | | | | | | |
| | ID NO: | HNHYTQKSLSLSPG | | | | | | |
| | 1447) | (SEQ ID NO: 44) | | | | | | |
| PMAB18 | QVQLVQ | ASTKGPSVFPLAPSS | GGGGSG | EVQLLES | GGGGSG | DIQMTQS | DIQMTQS | RTVAAPSV |
| | SGAEVK | KSTSGGTAALGCLVK | GGGSGG | GGGLVQP | GGGSGG | PSSLSAS | PSSLSAS | FIFPPSDE |
| | KPGASV | DYFPEPVTVSWNSGA | GGS | GGSLRLS | GGSGGG | VGDRVTI | VGDRVTI | QLKSGTAS |
| | KVSCKA | LTSGVHTFPAVLQSS | (SEQ | CAASGFT | GS | TCRASQS | TCQASRD | VVCLLNNF |
| | SGYSFT | GLYSLSSVVTVPSSS | ID NO: | FSSYWMH | (SEQ | ISSSLAW | IKNYLAW | YPREAKVQ |
| | TYYMHW | LGTQTYICNVNHKPS | 30) | WVRQAPG | ID NO: | YQQKPGK | YQQKPGK | WKVDNALQ |
| | VRQAPG | NTKVDKKVEPKSCDK | | KGLEWVS | 22) | APKLLIY | APKLLIY | SGNSQESV |
| | QGLEWM | THTCPPCPAPEAAGA | | YISGSGG | | AASSLQS | AASSLQS | TEQDSKDS |
| | GIIAPS | PSVFLFPPKPKDTLM | | YTNYADS | | GVPSRFS | GVPSRFS | TYSLSSTL |
| | GGSTSY | ISRTPEVTCVVVDVS | | VKGRFTI | | GSGSGTD | GSGSGTD | TLSKADYE |
| | AQKFQG | HEDPEVKFNWYVDGV | | SRDNSKN | | FTLTISS | FTLTISS | KHKVYACE |
| | RVTMTR | EVHNAKTKPREEQYN | | TLYLQMN | | LQPEDFA | LQPEDFA | VTHQGLSS |
| | DTSTST | STYRVVSVLTVLHQD | | SLRAEDT | | TYYCQQY | TYYCQQS | PVTKSFNR |
| | VYMELS | WLNGKEYKCKVSNKA | | AVYYCAR | | KSYPVTF | YSTPPTF | GEC (SEQ |
| | SLRSED | LPAPIEKTISKAKGQ | | DRPYYYD | | GQGTKVE | GPGTKVD | ID NO: |
| | TAVYYC | PREPQVYTLPPSREE | | MDVWGKG | | IK (SEQ | IK (SEQ | 45) |
| | ASGWVY | MTKNQVSLTCLVKGF | | TTVTVSS | | ID NO: | ID NO: | |
| | WGQGTL | YPSDIAVEWESNGQP | | (SEQ ID | | 1367) | 1449) | |
| | VTVSS | ENNYKTTPPVLDSDG | | NO: | | | | |
| | (SEQ | SFFLYSKLTVDKSRW | | 1445) | | | | |
| | ID NO: | QQGNVFSCSVMHEAL | | | | | | |
| | 1448) | HNHYTQKSLSLSPG | | | | | | |
| | | (SEQ ID NO: 44) | | | | | | |
| PMAB19 | EVQLLE | ASTKGPSVFPLAPSS | GGGGSG | EVQLLES | GGGGSG | DIQMTQS | DIVMTQS | RTVAAPSV |
| | SGGGLV | KSTSGGTAALGCLVK | GGGSGG | GGGLVQP | GGGSGG | PSSLSAS | PDSLAVS | FIFPPSDE |
| | QPGGSL | DYFPEPVTVSWNSGA | GGS | GGSLRLS | GGSGGG | VGDRVTI | LGERATI | QLKSGTAS |
| | RLSCAA | LTSGVHTFPAVLQSS | (SEQ | CAASGFT | GS | TCRASQS | NCKSSQS | VVCLLNNF |
| | SGFTFS | GLYSLSSVVTVPSSS | ID NO: | FSSFWMH | (SEQ | VSRSLAW | VLYSPNN | YPREAKVQ |
| | NSDMSW | LGTQTYICNVNHKPS | 30) | WVRQAPG | ID NO: | YQQKPGK | KNYLAWY | WKVDNALQ |
| | VRQAPG | NTKVDKKVEPKSCDK | | KGLEWIS | 22) | APKLLIY | QQKPGQP | SGNSQESV |
| | KGLEWV | THTCPPCPAPEAAGA | | YISGDSG | | AASSLQS | PKLLIYW | TEQDSKDS |
| | SGITIS | PSVFLFPPKPKDTLM | | YTNYADS | | GVPSRFS | ASTRESG | TYSLSSTL |
| | GGSTYY | ISRTPEVTCVVVDVS | | VKGRFTI | | GSGSGTD | VPDRFSG | TLSKADYE |
| | ADSVKG | HEDPEVKFNWYVDGV | | SRDNSKN | | FTLTISS | SGSGTDF | KHKVYACE |
| | RFTISR | EVHNAKTKPREEQYN | | TLYLQMN | | LQPEDFA | TLTISSL | VTHQGLSS |
| | DNSKNT | STYRVVSVLTVLHQD | | SLRAEDT | | TYYCQQY | QAEDVAV | PVTKSFNR |
| | LYLQMN | WLNGKEYKCKVSNKA | | AVYYCAR | | KSYPVTF | YYCQQYY | GEC (SEQ |
| | SLRAED | LPAPIEKTISKAKGQ | | DRPYYYY | | GQGTKVE | TTPPTFG | ID NO: |
| | TAVYYC | PREPQVYTLPPSREE | | MDVWGKG | | IK (SEQ | QGTRLEI | 45) |
| | ARGRGG | MTKNQVSLTCLVKGF | | TTVTVSS | | ID NO: | K (SEQ | |
| | SGWLDY | YPSDIAVEWESNGQP | | (SEQ ID | | 592) | ID NO: | |
| | WGQGTL | ENNYKTTPPVLDSDG | | NO: | | | 1359) | |
| | VTVSS | SFFLYSKLTVDKSRW | | 1353) | | | | |
| | (SEQ | QQGNVFSCSVMHEAL | | | | | | |
| | ID NO: | HNHYTQKSLSLSPG | | | | | | |
| | 1438) | (SEQ ID NO: 44) | | | | | | |
| PMAB20 | EVQLLE | ASTKGPSVFPLAPSS | GGGGSG | EVQLLES | GGGGSG | DIQMTQS | DIVMTQS | RTVAAPSV |
| | SGGGLV | KSTSGGTAALGCLVK | GGGSGG | GGGLVQP | GGGSGG | PSSLSAS | PDSLAVS | FIFPPSDE |
| | QPGGSL | DYFPEPVTVSWNSGA | GGS | GGSLRLS | GGSGGG | VGDRVTI | LGERATI | QLKSGTAS |
| | RLSCAA | LTSGVHTFPAVLQSS | (SEQ | CAASGFT | GS | TCRASQS | NCKSSQS | VVCLLNNF |
| | SGFTFS | GLYSLSSVVTVPSSS | ID NO: | FSDYWMH | (SEQ | VSRSLAW | VLYSPNN | YPREAKVQ |
| | NSDMSW | LGTQTYICNVNHKPS | 30) | WVRQAPG | ID NO: | YQQKPGK | KNYLAWY | WKVDNALQ |
| | VRQAPG | NTKVDKKVEPKSCDK | | KGLEWIS | 22) | APKLLIY | QQKPGQP | SGNSQESV |
| | KGLEWV | THTCPPCPAPEAAGA | | YISGDSG | | AASSLQS | PKLLIYW | TEQDSKDS |
| | SGITIS | PSVFLFPPKPKDTLM | | YTNYADS | | GVPSRFS | ASTRESG | TYSLSSTL |
| | GGSTYY | ISRTPEVTCVVVDVS | | VKGRFTI | | GSGSGTD | VPDRFSG | TLSKADYE |
| | ADSVKG | HEDPEVKFNWYVDGV | | SRDNSKN | | FTLTISS | SGSGTDF | KHKVYACE |
| | RFTISR | EVHNAKTKPREEQYN | | TLYLQMN | | LQPEDFA | TLTISSL | VTHQGLSS |
| | DNSKNT | STYRVVSVLTVLHQD | | SLRAEDT | | TYYCQQY | QAEDVAV | PVTKSFNR |
| | LYLQMN | WLNGKEYKCKVSNKA | | AVYYCAR | | KSYPVTF | YYCQQYY | GEC (SEQ |
| | SLRAED | LPAPIEKTISKAKGQ | | DRPYYYY | | GQGTKVE | TTPPTFG | ID NO: |
| | TAVYYC | PREPQVYTLPPSREE | | MDVWGKG | | IK (SEQ | QGTRLEI | 45) |
| | ARGRGG | MTKNQVSLTCLVKGF | | TTVTVSS | | ID NO: | K (SEQ | |
| | SGWLDY | YPSDIAVEWESNGQP | | (SEQ ID | | 592) | ID NO: | |
| | WGQGTL | ENNYKTTPPVLDSDG | | NO: | | | 1359) | |
| | VTVSS | SFFLYSKLTVDKSRW | | 1391) | | | | |
| | (SEQ | QQGNVFSCSVMHEAL | | | | | | |
| | ID NO: | HNHYTQKSLSLSPG | | | | | | |
| | 1438) | (SEQ ID NO: 44) | | | | | | |
| PMAB21 | EVQLLE | ASTKGPSVFPLAPSS | GGGGSG | EVQLLES | GGGGSG | DIQMTQS | DIVMTQS | RTVAAPSV |
| | SGGGLV | KSTSGGTAALGCLVK | GGGSGG | GGGLVQP | GGGSGG | PSSLSAS | PDSLAVS | FIFPPSDE |
| | QPGGSL | DYFPEPVTVSWNSGA | GGS | GGSLRLS | GGSGGG | VGDRVTI | LGERATI | QLKSGTAS |
| | RLSCAA | LTSGVHTFPAVLQSS | (SEQ | CAASGFT | GS | TCRASQS | NCKSSQS | VVCLLNNF |
| | SGFTFS | GLYSLSSVVTVPSSS | ID NO: | FSDFAMH | (SEQ | VSRSLAW | VLYSPNN | YPREAKVQ |
| | NSDMSW | LGTQTYICNVNHKPS | 30) | WVRQAPG | ID NO: | YQQKPGK | KNYLAWY | WKVDNALQ |
| | VRQAPG | NTKVDKKVEPKSCDK | | KGLEWIS | 22) | APKLLIY | QQKPGQP | SGNSQESV |
| | KGLEWV | THTCPPCPAPEAAGA | | YISGDSG | | AASSLQS | PKLLIYW | TEQDSKDS |
| | SGITIS | PSVFLFPPKPKDTLM | | YTNYADS | | GVPSRFS | ASTRESG | TYSLSSTL |
| | GGSTYY | ISRTPEVTCVVVDVS | | VKGRFTI | | GSGSGTD | VPDRFSG | TLSKADYE |
| | ADSVKG | HEDPEVKFNWYVDGV | | SRDNSKN | | FTLTISS | SGSGTDF | KHKVYACE |
| | RFTISR | EVHNAKTKPREEQYN | | TLYLQMN | | LQPEDFA | TLTISSL | VTHQGLSS |
| | DNSKNT | STYRVVSVLTVLHQD | | SLRAEDT | | TYYCQQY | QAEDVAV | PVTKSFNR |
| | LYLQMN | WLNGKEYKCKVSNKA | | AVYYCAR | | KSYPVTF | YYCQQYY | GEC (SEQ |
| | SLRAED | LPAPIEKTISKAKGQ | | DRPYYYY | | GQGTKVE | TTPPTFG | ID NO: |
| | TAVYYC | PREPQVYTLPPSREE | | MDVWGKG | | IK (SEQ | QGTRLEI | 45) |
| | ARGRGG | MTKNQVSLTCLVKGF | | TTVTVSS | | ID NO: | K (SEQ | |
| | SGWLDY | YPSDIAVEWESNGQP | | (SEQ ID | | 592) | ID NO: | |
| | WGQGTL | ENNYKTTPPVLDSDG | | NO: | | | 1359) | |
| | VTVSS | SFFLYSKLTVDKSRW | | 1450) | | | | |
| | (SEQ | QQGNVFSCSVMHEAL | | | | | | |
| | ID NO: | HNHYTQKSLSLSPG | | | | | | |
| | 1438) | (SEQ ID NO: 44) | | | | | | |
| PMAB22 | EVQLLE | ASTKGPSVFPLAPSS | GGGGSG | EVQLLES | GGGGSG | DIQMTQS | DIVMTQS | RTVAAPSV |
| | SGGGLV | KSTSGGTAALGCLVK | GGGSGG | GGGLVQP | GGGSGG | PSSLSAS | PDSLAVS | FIFPPSDE |
| | QPGGSL | DYFPEPVTVSWNSGA | GGS | GGSLRLS | GGSGGG | VGDRVTI | LGERATI | QLKSGTAS |
| | RLSCAA | LTSGVHTFPAVLQSS | (SEQ | CAASGFT | GS | TCRASQS | NCKSSQS | VVCLLNNF |
| | SGFTFS | GLYSLSSVVTVPSSS | ID NO: | FSDFWMS | (SEQ | VSRSLAW | VLYSPNN | YPREAKVQ |
| | NSDMSW | LGTQTYICNVNHKPS | 30) | WVRQAPG | ID NO: | YQQKPGK | KNYLAWY | WKVDNALQ |
| | VRQAPG | NTKVDKKVEPKSCDK | | KGLEWIS | 22) | APKLLIY | QQKPGQP | SGNSQESV |
| | KGLEWV | THTCPPCPAPEAAGA | | YISGDSG | | AASSLQS | PKLLIYW | TEQDSKDS |
| | SGITIS | PSVFLFPPKPKDTLM | | YTNYADS | | GVPSRFS | ASTRESG | TYSLSSTL |
| | GGSTYY | ISRTPEVTCVVVDVS | | VKGRFTI | | GSGSGTD | VPDRFSG | TLSKADYE |
| | ADSVKG | HEDPEVKFNWYVDGV | | SRDNSKN | | FTLTISS | SGSGTDF | KHKVYACE |
| | RFTISR | EVHNAKTKPREEQYN | | TLYLQMN | | LQPEDFA | TLTISSL | VTHQGLSS |
| | DNSKNT | STYRVVSVLTVLHQD | | SLRAEDT | | TYYCQQY | QAEDVAV | PVTKSFNR |
| | LYLQMN | WLNGKEYKCKVSNKA | | AVYYCAR | | KSYPVTF | YYCQQYY | GEC (SEQ |
| | SLRAED | LPAPIEKTISKAKGQ | | DRPYYYY | | GQGTKVE | TTPPTFG | ID NO: |
| | TAVYYC | PREPQVYTLPPSREE | | MDVWGKG | | IK (SEQ | QGTRLEI | 45) |
| | ARGRGG | MTKNQVSLTCLVKGF | | TTVTVSS | | ID NO: | K (SEQ | |
| | SGWLDY | YPSDIAVEWESNGQP | | (SEQ ID | | 592) | ID NO: | |
| | WGQGTL | ENNYKTTPPVLDSDG | | NO: | | | 1359) | |
| | VTVSS | SFFLYSKLTVDKSRW | | 1451) | | | | |
| | (SEQ | QQGNVFSCSVMHEAL | | | | | | |
| | ID NO: | HNHYTQKSLSLSPG | | | | | | |
| | 1438) | (SEQ ID NO: 44) | | | | | | |
| PMAB23 | EVQLLE | ASTKGPSVFPLAPSS | GGGGSG | EVQLLES | GGGGSG | DIQMTQS | DIVMTQS | RTVAAPSV |
| | SGGGLV | KSTSGGTAALGCLVK | GGGSGG | GGGLVQP | GGGSGG | PSSLSAS | PDSLAVS | FIFPPSDE |
| | QPGGSL | DYFPEPVTVSWNSGA | GGS | GGSLRLS | GGSGGG | VGDRVTI | LGERATI | QLKSGTAS |
| | RLSCAA | LTSGVHTFPAVLQSS | (SEQ | CAASGFT | GS | TCRASQS | NCKSSQS | VVCLLNNF |
| | SGFTFS | GLYSLSSVVTVPSSS | ID NO: | FSDFWMH | (SEQ | VSRSLAW | VLYSPNN | YPREAKVQ |
| | NSDMSW | LGTQTYICNVNHKPS | 30) | WVRQAPG | ID NO: | YQQKPGK | KNYLAWY | WKVDNALQ |
| | VRQAPG | NTKVDKKVEPKSCDK | | KGLEWVS | 22) | APKLLIY | QQKPGQP | SGNSQESV |
| | KGLEWV | THTCPPCPAPEAAGA | | YISGDSG | | AASSLQS | PKLLIYW | TEQDSKDS |
| | SGITIS | PSVFLFPPKPKDTLM | | YTNYADS | | GVPSRFS | ASTRESG | TYSLSSTL |
| | GGSTYY | ISRTPEVTCVVVDVS | | VKGRFTI | | GSGSGTD | VPDRFSG | TLSKADYE |
| | ADSVKG | HEDPEVKFNWYVDGV | | SRDNSKN | | FTLTISS | SGSGTDF | KHKVYACE |
| | RFTISR | EVHNAKTKPREEQYN | | TLYLQMN | | LQPEDFA | TLTISSL | VTHQGLSS |
| | DNSKNT | STYRVVSVLTVLHQD | | SLRAEDT | | TYYCQQY | QAEDVAV | PVTKSFNR |
| | LYLQMN | WLNGKEYKCKVSNKA | | AVYYCAR | | KSYPVTF | YYCQQYY | GEC (SEQ |
| | SLRAED | LPAPIEKTISKAKGQ | | DRPYYYY | | GQGTKVE | TTPPTFG | ID NO: |
| | TAVYYC | PREPQVYTLPPSREE | | MDVWGKG | | IK (SEQ | QGTRLEI | 45) |
| | ARGRGG | MTKNQVSLTCLVKGF | | TTVTVSS | | ID NO: | K (SEQ | |
| | SGWLDY | YPSDIAVEWESNGQP | | (SEQ ID | | 592) | ID NO: | |
| | WGQGTL | ENNYKTTPPVLDSDG | | NO: | | | 1359) | |
| | VTVSS | SFFLYSKLTVDKSRW | | 1452) | | | | |
| | (SEQ | QQGNVFSCSVMHEAL | | | | | | |
| | ID NO: | HNHYTQKSLSLSPG | | | | | | |
| | 1438) | (SEQ ID NO: 44) | | | | | | |
| PMAB24 | EVQLLE | ASTKGPSVFPLAPSS | GGGGSG | EVQLLES | GGGGSG | DIQMTQS | DIVMTQS | RTVAAPSV |
| | SGGGLV | KSTSGGTAALGCLVK | GGGSGG | GGGLVQP | GGGSGG | PSSLSAS | PDSLAVS | FIFPPSDE |
| | QPGGSL | DYFPEPVTVSWNSGA | GGS | GGSLRLS | GGSGGG | VGDRVTI | LGERATI | QLKSGTAS |
| | RLSCAA | LTSGVHTFPAVLQSS | (SEQ | CAASGFT | GS | TCRASQS | NCKSSQS | VVCLLNNF |
| | SGFTFS | GLYSLSSVVTVPSSS | ID NO: | FSDFWMH | (SEQ | VSRSLAW | VLYSPNN | YPREAKVQ |
| | NSDMSW | LGTQTYICNVNHKPS | 30) | WVRQAPG | ID NO: | YQQKPGK | KNYLAWY | WKVDNALQ |
| | VRQAPG | NTKVDKKVEPKSCDK | | KGLEWIS | 22) | APKLLIY | QQKPGQP | SGNSQESV |
| | KGLEWV | THTCPPCPAPEAAGA | | AISGDSG | | AASSLQS | PKLLIYW | TEQDSKDS |
| | SGITIS | PSVFLFPPKPKDTLM | | YTNYADS | | GVPSRFS | ASTRESG | TYSLSSTL |
| | GGSTYY | ISRTPEVTCVVVDVS | | VKGRFTI | | GSGSGTD | VPDRFSG | TLSKADYE |
| | ADSVKG | HEDPEVKFNWYVDGV | | SRDNSKN | | FTLTISS | SGSGTDF | KHKVYACE |
| | RFTISR | EVHNAKTKPREEQYN | | TLYLQMN | | LQPEDFA | TLTISSL | VTHQGLSS |
| | DNSKNT | STYRVVSVLTVLHQD | | SLRAEDT | | TYYCQQY | QAEDVAV | PVTKSFNR |
| | LYLQMN | WLNGKEYKCKVSNKA | | AVYYCAR | | KSYPVTF | YYCQQYY | GEC (SEQ |
| | SLRAED | LPAPIEKTISKAKGQ | | DRPYYYY | | GQGTKVE | TTPPTFG | ID NO: |
| | TAVYYC | PREPQVYTLPPSREE | | MDVWGKG | | IK (SEQ | QGTRLEI | 45) |
| | ARGRGG | MTKNQVSLTCLVKGF | | TTVTVSS | | ID NO: | K (SEQ | |
| | SGWLDY | YPSDIAVEWESNGQP | | (SEQ ID | | 592) | ID NO: | |
| | WGQGTL | ENNYKTTPPVLDSDG | | NO: | | | 1359) | |
| | VTVSS | SFFLYSKLTVDKSRW | | 1453) | | | | |
| | (SEQ | QQGNVFSCSVMHEAL | | | | | | |
| | ID NO: | HNHYTQKSLSLSPG | | | | | | |
| | 1438) | (SEQ ID NO: 44) | | | | | | |
| PMAB25 | EVQLLE | ASTKGPSVFPLAPSS | GGGGSG | EVQLLES | GGGGSG | DIQMTQS | DIVMTQS | RTVAAPSV |
| | SGGGLV | KSTSGGTAALGCLVK | GGGSGG | GGGLVQP | GGGSGG | PSSLSAS | PDSLAVS | FIFPPSDE |
| | QPGGSL | DYFPEPVTVSWNSGA | GGS | GGSLRLS | GGSGGG | VGDRVTI | LGERATI | QLKSGTAS |
| | RLSCAA | LTSGVHTFPAVLQSS | (SEQ | CAASGFT | GS | TCRASQS | NCKSSQS | VVCLLNNF |
| | SGFTFS | GLYSLSSVVTVPSSS | ID NO: | FSDFWMH | (SEQ | VSRSLAW | VLYSPNN | YPREAKVQ |
| | NSDMSW | LGTQTYICNVNHKPS | 30) | WVRQAPG | ID NO: | YQQKPGK | KNYLAWY | WKVDNALQ |
| | VRQAPG | NTKVDKKVEPKSCDK | | KGLEWIS | 22) | APKLLIY | QQKPGQP | SGNSQESV |
| | KGLEWV | THTCPPCPAPEAAGA | | YISGSSG | | AASSLQS | PKLLIYW | TEQDSKDS |
| | SGITIS | PSVFLFPPKPKDTLM | | YTNYADS | | GVPSRFS | ASTRESG | TYSLSSTL |
| | GGSTYY | ISRTPEVTCVVVDVS | | VKGRFTI | | GSGSGTD | VPDRFSG | TLSKADYE |
| | ADSVKG | HEDPEVKFNWYVDGV | | SRDNSKN | | FTLTISS | SGSGTDF | KHKVYACE |
| | RFTISR | EVHNAKTKPREEQYN | | TLYLQMN | | LQPEDFA | TLTISSL | VTHQGLSS |
| | DNSKNT | STYRVVSVLTVLHQD | | SLRAEDT | | TYYCQQY | QAEDVAV | PVTKSFNR |
| | LYLQMN | WLNGKEYKCKVSNKA | | AVYYCAR | | KSYPVTF | YYCQQYY | GEC (SEQ |
| | SLRAED | LPAPIEKTISKAKGQ | | DRPYYYY | | GQGTKVE | TTPPTFG | ID NO: |
| | TAVYYC | PREPQVYTLPPSREE | | MDVWGKG | | IK (SEQ | QGTRLEI | 45) |
| | ARGRGG | MTKNQVSLTCLVKGF | | TTVTVSS | | ID NO: | K (SEQ | |
| | SGWLDY | YPSDIAVEWESNGQP | | (SEQ ID | | 592) | ID NO: | |
| | WGQGTL | ENNYKTTPPVLDSDG | | NO: | | | 1359) | |
| | VTVSS | SFFLYSKLTVDKSRW | | 1454) | | | | |
| | (SEQ | QQGNVFSCSVMHEAL | | | | | | |
| | ID NO: | HNHYTQKSLSLSPG | | | | | | |
| | 1438) | (SEQ ID NO: 44) | | | | | | |
| PMAB26 | EVQLLE | ASTKGPSVFPLAPSS | GGGGSG | EVQLLES | GGGGSG | DIQMTQS | DIVMTQS | RTVAAPSV |
| | SGGGLV | KSTSGGTAALGCLVK | GGGSGG | GGGLVQP | GGGSGG | PSSLSAS | PDSLAVS | FIFPPSDE |
| | QPGGSL | DYFPEPVTVSWNSGA | GGS | GGSLRLS | GGSGGG | VGDRVTI | LGERATI | QLKSGTAS |
| | RLSCAA | LTSGVHTFPAVLQSS | (SEQ | CAASGFT | GS | TCRASQS | NCKSSQS | VVCLLNNF |
| | SGFTFS | GLYSLSSVVTVPSSS | ID NO: | FSDFWMH | (SEQ | VSRSLAW | VLYSPNN | YPREAKVQ |
| | NSDMSW | LGTQTYICNVNHKPS | 30) | WVRQAPG | ID NO: | YQQKPGK | KNYLAWY | WKVDNALQ |
| | VRQAPG | NTKVDKKVEPKSCDK | | KGLEWIS | 22) | APKLLIY | QQKPGQP | SGNSQESV |
| | KGLEWV | THTCPPCPAPEAAGA | | YISGDGG | | AASSLQS | PKLLIYW | TEQDSKDS |
| | SGITIS | PSVFLFPPKPKDTLM | | YTNYADS | | GVPSRFS | ASTRESG | TYSLSSTL |
| | GGSTYY | ISRTPEVTCVVVDVS | | VKGRFTI | | GSGSGTD | VPDRFSG | TLSKADYE |
| | ADSVKG | HEDPEVKFNWYVDGV | | SRDNSKN | | FTLTISS | SGSGTDF | KHKVYACE |
| | RFTISR | EVHNAKTKPREEQYN | | TLYLQMN | | LQPEDFA | TLTISSL | VTHQGLSS |
| | DNSKNT | STYRVVSVLTVLHQD | | SLRAEDT | | TYYCQQY | QAEDVAV | PVTKSFNR |
| | LYLQMN | WLNGKEYKCKVSNKA | | AVYYCAR | | KSYPVTF | YYCQQYY | GEC (SEQ |
| | SLRAED | LPAPIEKTISKAKGQ | | DRPYYYY | | GQGTKVE | TTPPTFG | ID NO: |
| | TAVYYC | PREPQVYTLPPSREE | | MDVWGKG | | IK (SEQ | QGTRLEI | 45) |
| | ARGRGG | MTKNQVSLTCLVKGF | | TTVTVSS | | ID NO: | K (SEQ | |
| | SGWLDY | YPSDIAVEWESNGQP | | (SEQ ID | | 592) | ID NO: | |
| | WGQGTL | ENNYKTTPPVLDSDG | | NO: | | | 1359) | |
| | VTVSS | SFFLYSKLTVDKSRW | | 1455) | | | | |
| | (SEQ | QQGNVFSCSVMHEAL | | | | | | |
| | ID NO: | HNHYTQKSLSLSPG | | | | | | |
| | 1438) | (SEQ ID NO: 44) | | | | | | |
| PMAB27 | EVQLLE | ASTKGPSVFPLAPSS | GGGGSG | EVQLLES | GGGGSG | DIQMTQS | DIVMTQS | RTVAAPSV |
| | SGGGLV | KSTSGGTAALGCLVK | GGGSGG | GGGLVQP | GGGSGG | PSSLSAS | PDSLAVS | FIFPPSDE |
| | QPGGSL | DYFPEPVTVSWNSGA | GGS | GGSLRLS | GGSGGG | VGDRVTI | LGERATI | QLKSGTAS |
| | RLSCAA | LTSGVHTFPAVLQSS | (SEQ | CAASGFT | GS | TCRASQS | NCKSSQS | VVCLLNNF |
| | SGFTFS | GLYSLSSVVTVPSSS | ID NO: | FSDFWMH | (SEQ | VSRSLAW | VLYSPNN | YPREAKVQ |
| | NSDMSW | LGTQTYICNVNHKPS | 30) | WVRQAPG | ID NO: | YQQKPGK | KNYLAWY | WKVDNALQ |
| | VRQAPG | NTKVDKKVEPKSCDK | | KGLEWIS | 22) | APKLLIY | QQKPGQP | SGNSQESV |
| | KGLEWV | THTCPPCPAPEAAGA | | YISGDSG | | AASSLQS | PKLLIYW | TEQDSKDS |
| | SGITIS | PSVFLFPPKPKDTLM | | STNYADS | | GVPSRFS | ASTRESG | TYSLSSTL |
| | GGSTYY | ISRTPEVTCVVVDVS | | VKGRFTI | | GSGSGTD | VPDRFSG | TLSKADYE |
| | ADSVKG | HEDPEVKFNWYVDGV | | SRDNSKN | | FTLTISS | SGSGTDF | KHKVYACE |
| | RFTISR | EVHNAKTKPREEQYN | | TLYLQMN | | LQPEDFA | TLTISSL | VTHQGLSS |
| | DNSKNT | STYRVVSVLTVLHQD | | SLRAEDT | | TYYCQQY | QAEDVAV | PVTKSFNR |
| | LYLQMN | WLNGKEYKCKVSNKA | | AVYYCAR | | KSYPVTF | YYCQQYY | GEC (SEQ |
| | SLRAED | LPAPIEKTISKAKGQ | | DRPYYYY | | GQGTKVE | TTPPTFG | ID NO: |
| | TAVYYC | PREPQVYTLPPSREE | | MDVWGKG | | IK (SEQ | QGTRLEI | 45) |
| | ARGRGG | MTKNQVSLTCLVKGF | | TTVTVSS | | ID NO: | K (SEQ | |
| | SGWLDY | YPSDIAVEWESNGQP | | (SEQ ID | | 592) | ID NO: | |
| | WGQGTL | ENNYKTTPPVLDSDG | | NO: | | | 1359) | |
| | VTVSS | SFFLYSKLTVDKSRW | | 1456) | | | | |
| | (SEQ | QQGNVFSCSVMHEAL | | | | | | |
| | ID NO: | HNHYTQKSLSLSPG | | | | | | |
| | 1438) | (SEQ ID NO: 44) | | | | | | |
| PMAB28 | EVQLLE | ASTKGPSVFPLAPSS | GGGGSG | EVQLLES | GGGGSG | DIQMTQS | DIVMTQS | RTVAAPSV |
| | SGGGLV | KSTSGGTAALGCLVK | GGGSGG | GGGLVQP | GGGSGG | PSSLSAS | PDSLAVS | FIFPPSDE |
| | QPGGSL | DYFPEPVTVSWNSGA | GGS | GGSLRLS | GGSGGG | VGDRVTI | LGERATI | QLKSGTAS |
| | RLSCAA | LTSGVHTFPAVLQSS | (SEQ | CAASGFT | GS | TCRASQS | NCKSSQS | VVCLLNNF |
| | SGFTFS | GLYSLSSVVTVPSSS | ID NO: | FSDFWMH | (SEQ | VSRSLAW | VLYSPNN | YPREAKVQ |
| | NSDMSW | LGTQTYICNVNHKPS | 30) | WVRQAPG | ID NO: | YQQKPGK | KNYLAWY | WKVDNALQ |
| | VRQAPG | NTKVDKKVEPKSCDK | | KGLEWIS | 22) | APKLLIY | QQKPGQP | SGNSQESV |
| | KGLEWV | THTCPPCPAPEAAGA | | YISGDSG | | AASSLQS | PKLLIYW | TEQDSKDS |
| | SGITIS | PSVFLFPPKPKDTLM | | YTYYADS | | GVPSRFS | ASTRESG | TYSLSSTL |
| | GGSTYY | ISRTPEVTCVVVDVS | | VKGRFTI | | GSGSGTD | VPDRFSG | TLSKADYE |
| | ADSVKG | HEDPEVKFNWYVDGV | | SRDNSKN | | FTLTISS | SGSGTDF | KHKVYACE |
| | RFTISR | EVHNAKTKPREEQYN | | TLYLQMN | | LQPEDFA | TLTISSL | VTHQGLSS |
| | DNSKNT | STYRVVSVLTVLHQD | | SLRAEDT | | TYYCQQY | QAEDVAV | PVTKSFNR |
| | LYLQMN | WLNGKEYKCKVSNKA | | AVYYCAR | | KSYPVTF | YYCQQYY | GEC (SEQ |
| | SLRAED | LPAPIEKTISKAKGQ | | DRPYYYY | | GQGTKVE | TTPPTFG | ID NO: |
| | TAVYYC | PREPQVYTLPPSREE | | MDVWGKG | | IK (SEQ | QGTRLEI | 45) |
| | ARGRGG | MTKNQVSLTCLVKGF | | TTVTVSS | | ID NO: | K (SEQ | |
| | SGWLDY | YPSDIAVEWESNGQP | | (SEQ ID | | 592) | ID NO: | |
| | WGQGTL | ENNYKTTPPVLDSDG | | NO: | | | 1359) | |
| | VTVSS | SFFLYSKLTVDKSRW | | 1457) | | | | |
| | (SEQ | QQGNVFSCSVMHEAL | | | | | | |
| | ID NO: | HNHYTQKSLSLSPG | | | | | | |
| | 1438) | (SEQ ID NO: 44) | | | | | | |
| PMAB29 | EVQLLE | ASTKGPSVFPLAPSS | GGGGSG | EVQLLES | GGGGSG | DIQMTQS | DIVMTQS | RTVAAPSV |
| | SGGGLV | KSTSGGTAALGCLVK | GGGSGG | GGGLVQP | GGGSGG | PSSLSAS | PDSLAVS | FIFPPSDE |
| | QPGGSL | DYFPEPVTVSWNSGA | GGS | GGSLRLS | GGSGGG | VGDRVTI | LGERATI | QLKSGTAS |
| | RLSCAA | LTSGVHTFPAVLQSS | (SEQ | CAASGFT | GS | TCRASQS | NCKSSQS | VVCLLNNF |
| | SGFTFS | GLYSLSSVVTVPSSS | ID NO: | FSDFWMH | (SEQ | VSRSLAW | VLYSPNN | YPREAKVQ |
| | NSDMSW | LGTQTYICNVNHKPS | 30) | WVRQAPG | ID NO: | YQQKPGK | KNYLAWY | WKVDNALQ |
| | VRQAPG | NTKVDKKVEPKSCDK | | KGLEWIS | 22) | APKLLIY | QQKPGQP | SGNSQESV |
| | KGLEWV | THTCPPCPAPEAAGA | | YISGDSG | | AASSLQS | PKLLIYW | TEQDSKDS |
| | SGITIS | PSVFLFPPKPKDTLM | | YTNYAAS | | GVPSRFS | ASTRESG | TYSLSSTL |
| | GGSTYY | ISRTPEVTCVVVDVS | | VKGRFTI | | GSGSGTD | VPDRFSG | TLSKADYE |
| | ADSVKG | HEDPEVKFNWYVDGV | | SRDNSKN | | FTLTISS | SGSGTDF | KHKVYACE |
| | RFTISR | EVHNAKTKPREEQYN | | TLYLQMN | | LQPEDFA | TLTISSL | VTHQGLSS |
| | DNSKNT | STYRVVSVLTVLHQD | | SLRAEDT | | TYYCQQY | QAEDVAV | PVTKSFNR |
| | LYLQMN | WLNGKEYKCKVSNKA | | AVYYCAR | | KSYPVTF | YYCQQYY | GEC (SEQ |
| | SLRAED | LPAPIEKTISKAKGQ | | DRPYYYY | | GQGTKVE | TTPPTFG | ID NO: |
| | TAVYYC | PREPQVYTLPPSREE | | MDVWGKG | | IK (SEQ | QGTRLEI | 45) |
| | ARGRGG | MTKNQVSLTCLVKGF | | TTVTVSS | | ID NO: | K (SEQ | |
| | SGWLDY | YPSDIAVEWESNGQP | | (SEQ ID | | 592) | ID NO: | |
| | WGQGTL | ENNYKTTPPVLDSDG | | NO: | | | 1359) | |
| | VTVSS | SFFLYSKLTVDKSRW | | 1458) | | | | |
| | (SEQ | QQGNVFSCSVMHEAL | | | | | | |
| | ID NO: | HNHYTQKSLSLSPG | | | | | | |
| | 1438) | (SEQ ID NO: 44) | | | | | | |
| PMAB30 | EVQLLE | ASTKGPSVFPLAPSS | GGGGSG | EVQLLES | GGGGSG | DIQMTQS | DIVMTQS | RTVAAPSV |
| | SGGGLV | KSTSGGTAALGCLVK | GGGSGG | GGGLVQP | GGGSGG | PSSLSAS | PDSLAVS | FIFPPSDE |
| | QPGGSL | DYFPEPVTVSWNSGA | GGS | GGSLRLS | GGSGGG | VGDRVTI | LGERATI | QLKSGTAS |
| | RLSCAA | LTSGVHTFPAVLQSS | (SEQ | CAASGFT | GS | TCRASQS | NCKSSQS | VVCLLNNF |
| | SGFTFS | GLYSLSSVVTVPSSS | ID NO: | FSDFWMH | (SEQ | VSRSLAW | VLYSPNN | YPREAKVQ |
| | NSDMSW | LGTQTYICNVNHKPS | 30) | WVRQAPG | ID NO: | YQQKPGK | KNYLAWY | WKVDNALQ |
| | VRQAPG | NTKVDKKVEPKSCDK | | KGLEWIS | 22) | APKLLIY | QQKPGQP | SGNSQESV |
| | KGLEWV | THTCPPCPAPEAAGA | | YISGDSG | | AASSLQS | PKLLIYW | TEQDSKDS |
| | SGITIS | PSVFLFPPKPKDTLM | | YTNYAQS | | GVPSRFS | ASTRESG | TYSLSSTL |
| | GGSTYY | ISRTPEVTCVVVDVS | | VKGRFTI | | GSGSGTD | VPDRFSG | TLSKADYE |
| | ADSVKG | HEDPEVKFNWYVDGV | | SRDNSKN | | FTLTISS | SGSGTDF | KHKVYACE |
| | RFTISR | EVHNAKTKPREEQYN | | TLYLQMN | | LQPEDFA | TLTISSL | VTHQGLSS |
| | DNSKNT | STYRVVSVLTVLHQD | | SLRAEDT | | TYYCQQY | QAEDVAV | PVTKSFNR |
| | LYLQMN | WLNGKEYKCKVSNKA | | AVYYCAR | | KSYPVTF | YYCQQYY | GEC (SEQ |
| | SLRAED | LPAPIEKTISKAKGQ | | DRPYYYY | | GQGTKVE | TTPPTFG | ID NO: |
| | TAVYYC | PREPQVYTLPPSREE | | MDVWGKG | | IK (SEQ | QGTRLEI | 45) |
| | ARGRGG | MTKNQVSLTCLVKGF | | TTVTVSS | | ID NO: | K (SEQ | |
| | SGWLDY | YPSDIAVEWESNGQP | | (SEQ ID | | 592) | ID NO: | |
| | WGQGTL | ENNYKTTPPVLDSDG | | NO: | | | 1359) | |
| | VTVSS | SFFLYSKLTVDKSRW | | 1459) | | | | |
| | (SEQ | QQGNVFSCSVMHEAL | | | | | | |
| | ID NO: | HNHYTQKSLSLSPG | | | | | | |
| | 1438) | (SEQ ID NO: 44) | | | | | | |
| PMAB31 | EVQLLE | ASTKGPSVFPLAPSS | GGGGSG | EVQLLES | GGGGSG | DIQMTQS | DIVMTQS | RTVAAPSV |
| | SGGGLV | KSTSGGTAALGCLVK | GGGSGG | GGGLVQP | GGGSGG | PSSLSAS | PDSLAVS | FIFPPSDE |
| | QPGGSL | DYFPEPVTVSWNSGA | GGS | GGSLRLS | GGSGGG | VGDRVTI | LGERATI | QLKSGTAS |
| | RLSCAA | LTSGVHTFPAVLQSS | (SEQ | CAASGFT | GS | TCRASQS | NCKSSQS | VVCLLNNF |
| | SGFTFS | GLYSLSSVVTVPSSS | ID NO: | FSDFWMH | (SEQ | VSRSLAW | VLYSPNN | YPREAKVQ |
| | NSDMSW | LGTQTYICNVNHKPS | 30) | WVRQAPG | ID NO: | YQQKPGK | KNYLAWY | WKVDNALQ |
| | VRQAPG | NTKVDKKVEPKSCDK | | KGLEWIS | 22) | APKLLIY | QQKPGQP | SGNSQESV |
| | KGLEWV | THTCPPCPAPEAAGA | | YISGDSG | | AASSLQS | PKLLIYW | TEQDSKDS |
| | SGITIS | PSVFLFPPKPKDTLM | | YTNYADS | | GVPSRFS | ASTRESG | TYSLSSTL |
| | GGSTYY | ISRTPEVTCVVVDVS | | VKGRFTI | | GSGSGTD | VPDRFSG | TLSKADYE |
| | ADSVKG | HEDPEVKFNWYVDGV | | SRDASKN | | FTLTISS | SGSGTDF | KHKVYACE |
| | RFTISR | EVHNAKTKPREEQYN | | TLYLQMN | | LQPEDFA | TLTISSL | VTHQGLSS |
| | DNSKNT | STYRVVSVLTVLHQD | | SLRAEDT | | TYYCQQY | QAEDVAV | PVTKSFNR |
| | LYLQMN | WLNGKEYKCKVSNKA | | AVYYCAR | | KSYPVTF | YYCQQYY | GEC (SEQ |
| | SLRAED | LPAPIEKTISKAKGQ | | DRPYYYY | | GQGTKVE | TTPPTFG | ID NO: |
| | TAVYYC | PREPQVYTLPPSREE | | MDVWGKG | | IK (SEQ | QGTRLEI | 45) |
| | ARGRGG | MTKNQVSLTCLVKGF | | TTVTVSS | | ID NO: | K (SEQ | |
| | SGWLDY | YPSDIAVEWESNGQP | | (SEQ ID | | 592) | ID NO: | |
| | WGQGTL | ENNYKTTPPVLDSDG | | NO: | | | 1359) | |
| | VTVSS | SFFLYSKLTVDKSRW | | 1460) | | | | |
| | (SEQ | QQGNVFSCSVMHEAL | | | | | | |
| | ID NO: | HNHYTQKSLSLSPG | | | | | | |
| | 1438) | (SEQ ID NO: 44) | | | | | | |
| PMAB32 | EVQLLE | ASTKGPSVFPLAPSS | GGGGSG | EVQLLES | GGGGSG | DIQMTQS | DIVMTQS | RTVAAPSV |
| | SGGGLV | KSTSGGTAALGCLVK | GGGSGG | GGGLVQP | GGGSGG | PSSLSAS | PDSLAVS | FIFPPSDE |
| | QPGGSL | DYFPEPVTVSWNSGA | GGS | GGSLRLS | GGSGGG | VGDRVTI | LGERATI | QLKSGTAS |
| | RLSCAA | LTSGVHTFPAVLQSS | (SEQ | CAASGFT | GS | TCRASQS | NCKSSQS | VVCLLNNF |
| | SGFTFS | GLYSLSSVVTVPSSS | ID NO: | FSDFWMH | (SEQ | VSRSLAW | VLYSPNN | YPREAKVQ |
| | NSDMSW | LGTQTYICNVNHKPS | 30) | WVRQAPG | ID NO: | YQQKPGK | KNYLAWY | WKVDNALQ |
| | VRQAPG | NTKVDKKVEPKSCDK | | KGLEWIS | 22) | APKLLIY | QQKPGQP | SGNSQESV |
| | KGLEWV | THTCPPCPAPEAAGA | | YISGDSG | | AASSLQS | PKLLIYW | TEQDSKDS |
| | SGITIS | PSVFLFPPKPKDTLM | | YTNYADS | | GVPSRFS | ASTRESG | TYSLSSTL |
| | GGSTYY | ISRTPEVTCVVVDVS | | VKGRFTI | | GSGSGTD | VPDRFSG | TLSKADYE |
| | ADSVKG | HEDPEVKFNWYVDGV | | SRDQSKN | | FTLTISS | SGSGTDF | KHKVYACE |
| | RFTISR | EVHNAKTKPREEQYN | | TLYLQMN | | LQPEDFA | TLTISSL | VTHQGLSS |
| | DNSKNT | STYRVVSVLTVLHQD | | SLRAEDT | | TYYCQQY | QAEDVAV | PVTKSFNR |
| | LYLQMN | WLNGKEYKCKVSNKA | | AVYYCAR | | KSYPVTF | YYCQQYY | GEC (SEQ |
| | SLRAED | LPAPIEKTISKAKGQ | | DRPYYYY | | GQGTKVE | TTPPTFG | ID NO: |
| | TAVYYC | PREPQVYTLPPSREE | | MDVWGKG | | IK (SEQ | QGTRLEI | 45) |
| | ARGRGG | MTKNQVSLTCLVKGF | | TTVTVSS | | ID NO: | K (SEQ | |
| | SGWLDY | YPSDIAVEWESNGQP | | (SEQ ID | | 592) | ID NO: | |
| | WGQGTL | ENNYKTTPPVLDSDG | | NO: | | | 1359) | |
| | VTVSS | SFFLYSKLTVDKSRW | | 1379) | | | | |
| | (SEQ | QQGNVFSCSVMHEAL | | | | | | |
| | ID NO: | HNHYTQKSLSLSPG | | | | | | |
| | 1438) | (SEQ ID NO: 44) | | | | | | |
| PMAB33 | EVQLLE | ASTKGPSVFPLAPSS | GGGGSG | EVQLLES | GGGGSG | DIQMTQS | DIVMTQS | RTVAAPSV |
| | SGGGLV | KSTSGGTAALGCLVK | GGGSGG | GGGLVQP | GGGSGG | PSSLSAS | PDSLAVS | FIFPPSDE |
| | QPGGSL | DYFPEPVTVSWNSGA | GGS | GGSLRLS | GGSGGG | VGDRVTI | LGERATI | QLKSGTAS |
| | RLSCAA | LTSGVHTFPAVLQSS | (SEQ | CAASGFT | GS | TCRASQS | NCKSSQS | VVCLLNNF |
| | SGFTFS | GLYSLSSVVTVPSSS | ID NO: | FSDFWMH | (SEQ | VSRSLAW | VLYSPNN | YPREAKVQ |
| | NSDMSW | LGTQTYICNVNHKPS | 30) | WVRQAPG | ID NO: | YQQKPGK | KNYLAWY | WKVDNALQ |
| | VRQAPG | NTKVDKKVEPKSCDK | | KGLEWIS | 22) | APKLLIY | QQKPGQP | SGNSQESV |
| | KGLEWV | THTCPPCPAPEAAGA | | YISGDSG | | AASSLQS | PKLLIYW | TEQDSKDS |
| | SGITIS | PSVFLFPPKPKDTLM | | YTNYADS | | GVPSRFS | ASTRESG | TYSLSSTL |
| | GGSTYY | ISRTPEVTCVVVDVS | | VKGRFTI | | GSGSGTD | VPDRFSG | TLSKADYE |
| | ADSVKG | HEDPEVKFNWYVDGV | | SRDNSKN | | FTLTISS | SGSGTDF | KHKVYACE |
| | RFTISR | EVHNAKTKPREEQYN | | TLYLQMA | | LQPEDFA | TLTISSL | VTHQGLSS |
| | DNSKNT | STYRVVSVLTVLHQD | | SLRAEDT | | TYYCQQY | QAEDVAV | PVTKSFNR |
| | LYLQMN | WLNGKEYKCKVSNKA | | AVYYCAR | | KSYPVTF | YYCQQYY | GEC (SEQ |
| | SLRAED | LPAPIEKTISKAKGQ | | DRPYYYY | | GQGTKVE | TTPPTFG | ID NO: |
| | TAVYYC | PREPQVYTLPPSREE | | MDVWGKG | | IK (SEQ | QGTRLEI | 45) |
| | ARGRGG | MTKNQVSLTCLVKGF | | TTVTVSS | | ID NO: | K (SEQ | |
| | SGWLDY | YPSDIAVEWESNGQP | | (SEQ ID | | 592) | ID NO: | |
| | WGQGTL | ENNYKTTPPVLDSDG | | NO: | | | 1359) | |
| | VTVSS | SFFLYSKLTVDKSRW | | 1461) | | | | |
| | (SEQ | QQGNVFSCSVMHEAL | | | | | | |
| | ID NO: | HNHYTQKSLSLSPG | | | | | | |
| | 1438) | (SEQ ID NO: 44) | | | | | | |
| PMAB34 | EVQLLE | ASTKGPSVFPLAPSS | GGGGSG | EVQLLES | GGGGSG | DIQMTQS | DIVMTQS | RTVAAPSV |
| | SGGGLV | KSTSGGTAALGCLVK | GGGSGG | GGGLVQP | GGGSGG | PSSLSAS | PDSLAVS | FIFPPSDE |
| | QPGGSL | DYFPEPVTVSWNSGA | GGS | GGSLRLS | GGSGGG | VGDRVTI | LGERATI | QLKSGTAS |
| | RLSCAA | LTSGVHTFPAVLQSS | (SEQ | CAASGFT | GS | TCRASQS | NCKSSQS | VVCLLNNF |
| | SGFTFS | GLYSLSSVVTVPSSS | ID NO: | FSDFWMH | (SEQ | VSRSLAW | VLYSPNN | YPREAKVQ |
| | NSDMSW | LGTQTYICNVNHKPS | 30) | WVRQAPG | ID NO: | YQQKPGK | KNYLAWY | WKVDNALQ |
| | VRQAPG | NTKVDKKVEPKSCDK | | KGLEWIS | 22) | APKLLIY | QQKPGQP | SGNSQESV |
| | KGLEWV | THTCPPCPAPEAAGA | | YISGDSG | | AASSLQS | PKLLIYW | TEQDSKDS |
| | SGITIS | PSVFLFPPKPKDTLM | | YTNYADS | | GVPSRFS | ASTRESG | TYSLSSTL |
| | GGSTYY | ISRTPEVTCVVVDVS | | VKGRFTI | | GSGSGTD | VPDRFSG | TLSKADYE |
| | ADSVKG | HEDPEVKFNWYVDGV | | SRDNSKN | | FTLTISS | SGSGTDF | KHKVYACE |
| | RFTISR | EVHNAKTKPREEQYN | | TLYLQMG | | LQPEDFA | TLTISSL | VTHQGLSS |
| | DNSKNT | STYRVVSVLTVLHQD | | SLRAEDT | | TYYCQQY | QAEDVAV | PVTKSFNR |
| | LYLQMN | WLNGKEYKCKVSNKA | | AVYYCAR | | KSYPVTF | YYCQQYY | GEC (SEQ |
| | SLRAED | LPAPIEKTISKAKGQ | | DRPYYYY | | GQGTKVE | TTPPTFG | ID NO: |
| | TAVYYC | PREPQVYTLPPSREE | | MDVWGKG | | IK (SEQ | QGTRLEI | 45) |
| | ARGRGG | MTKNQVSLTCLVKGF | | TTVTVSS | | ID NO: | K (SEQ | |
| | SGWLDY | YPSDIAVEWESNGQP | | | | 592) | ID NO: | |
| | WGQGTL | ENNYKTTPPVLDSDG | | (SEQ ID | | | 1359) | |
| | VTVSS | SFFLYSKLTVDKSRW | | NO: | | | | |
| | (SEQ | QQGNVFSCSVMHEAL | | 1462) | | | | |
| | ID NO: | HNHYTQKSLSLSPG | | | | | | |
| | 1438) | (SEQ ID NO: 44) | | | | | | |
| PMAB35 | EVQLLE | ASTKGPSVFPLAPSS | GGGGSG | EVQLLES | GGGGSG | DIQMTQS | DIVMTQS | RTVAAPSV |
| | SGGGLV | KSTSGGTAALGCLVK | GGGSGG | GGGLVQP | GGGSGG | PSSLSAS | PDSLAVS | FIFPPSDE |
| | QPGGSL | DYFPEPVTVSWNSGA | GGS | GGSLRLS | GGSGGG | VGDRVTI | LGERATI | QLKSGTAS |
| | RLSCAA | LTSGVHTFPAVLQSS | (SEQ | CAASGFT | GS | TCRASQS | NCKSSQS | VVCLLNNF |
| | SGFTFS | GLYSLSSVVTVPSSS | ID NO: | FSDFWMH | (SEQ | VSRSLAW | VLYSPNN | YPREAKVQ |
| | NSDMSW | LGTQTYICNVNHKPS | 30) | WVRQAPG | ID NO: | YQQKPGK | KNYLAWY | WKVDNALQ |
| | VRQAPG | NTKVDKKVEPKSCDK | | KGLEWIS | 22) | APKLLIY | QQKPGQP | SGNSQESV |
| | KGLEWV | THTCPPCPAPEAAGA | | YISGDSG | | AASSLQS | PKLLIYW | TEQDSKDS |
| | SGITIS | PSVFLFPPKPKDTLM | | YTNYADS | | GVPSRFS | ASTRESG | TYSLSSTL |
| | GGSTYY | ISRTPEVTCVVVDVS | | VKGRFTI | | GSGSGTD | VPDRFSG | TLSKADYE |
| | ADSVKG | HEDPEVKFNWYVDGV | | SRDNSKN | | FTLTISS | SGSGTDF | KHKVYACE |
| | RFTISR | EVHNAKTKPREEQYN | | TLYLQMQ | | LQPEDFA | TLTISSL | VTHQGLSS |
| | DNSKNT | STYRVVSVLTVLHQD | | SLRAEDT | | TYYCQQY | QAEDVAV | PVTKSFNR |
| | LYLQMN | WLNGKEYKCKVSNKA | | AVYYCAR | | KSYPVTF | YYCQQYY | GEC (SEQ |
| | SLRAED | LPAPIEKTISKAKGQ | | DRPYYYY | | GQGTKVE | TTPPTFG | ID NO: |
| | TAVYYC | PREPQVYTLPPSREE | | MDVWGKG | | IK (SEQ | QGTRLEI | 45) |
| | ARGRGG | MTKNQVSLTCLVKGF | | TTVTVSS | | ID NO: | K (SEQ | |
| | SGWLDY | YPSDIAVEWESNGQP | | (SEQ ID | | 592) | ID NO: | |
| | WGQGTL | ENNYKTTPPVLDSDG | | NO: | | | 1359) | |
| | VTVSS | SFFLYSKLTVDKSRW | | 1463) | | | | |
| | (SEQ | QQGNVFSCSVMHEAL | | | | | | |
| | ID NO: | HNHYTQKSLSLSPG | | | | | | |
| | 1438) | (SEQ ID NO: 44) | | | | | | |
| PMAB36 | EVQLLE | ASTKGPSVFPLAPSS | GGGGSG | EVQLLES | GGGGSG | DIQMTQS | DIVMTQS | RTVAAPSV |
| | SGGGLV | KSTSGGTAALGCLVK | GGGSGG | GGGLVQP | GGGSGG | PSSLSAS | PDSLAVS | FIFPPSDE |
| | QPGGSL | DYFPEPVTVSWNSGA | GGS | GGSLRLS | GGSGGG | VGDRVTI | LGERATI | QLKSGTAS |
| | RLSCAA | LTSGVHTFPAVLQSS | (SEQ | CAASGFT | GS | TCRASQS | NCKSSQS | VVCLLNNF |
| | SGFTFS | GLYSLSSVVTVPSSS | ID NO: | FSDFWMH | (SEQ | ISRSLAW | VLYSPNN | YPREAKVQ |
| | NSDMSW | LGTQTYICNVNHKPS | 30) | WVRQAPG | ID NO: | YQQKPGK | KNYLAWY | WKVDNALQ |
| | VRQAPG | NTKVDKKVEPKSCDK | | KGLEWIS | 22) | APKLLIY | QQKPGQP | SGNSQESV |
| | KGLEWV | THTCPPCPAPEAAGA | | YISGDSG | | AASSLQS | PKLLIYW | TEQDSKDS |
| | SGITIS | PSVFLFPPKPKDTLM | | YTNYADS | | GVPSRFS | ASTRESG | TYSLSSTL |
| | GGSTYY | ISRTPEVTCVVVDVS | | VKGRFTI | | GSGSGTD | VPDRFSG | TLSKADYE |
| | ADSVKG | HEDPEVKFNWYVDGV | | SRDNSKN | | FTLTISS | SGSGTDF | KHKVYACE |
| | RFTISR | EVHNAKTKPREEQYN | | TLYLQMN | | LQPEDFA | TLTISSL | VTHQGLSS |
| | DNSKNT | STYRVVSVLTVLHQD | | SLRAEDT | | TYYCQQY | QAEDVAV | PVTKSFNR |
| | LYLQMN | WLNGKEYKCKVSNKA | | AVYYCAR | | KSYPVTF | YYCQQYY | GEC (SEQ |
| | SLRAED | LPAPIEKTISKAKGQ | | DRPYYYY | | GQGTKVE | TTPPTFG | ID NO: |
| | TAVYYC | PREPQVYTLPPSREE | | MDVWGKG | | IK (SEQ | QGTRLEI | 45) |
| | ARGRGG | MTKNQVSLTCLVKGF | | TTVTVSS | | ID NO: | K (SEQ | |
| | SGWLDY | YPSDIAVEWESNGQP | | (SEQ ID | | 1363) | ID NO: | |
| | WGQGTL | ENNYKTTPPVLDSDG | | NO: | | | 1359) | |
| | VTVSS | SFFLYSKLTVDKSRW | | 591) | | | | |
| | (SEQ | QQGNVFSCSVMHEAL | | | | | | |
| | ID NO: | HNHYTQKSLSLSPG | | | | | | |
| | 1438) | (SEQ ID NO: 44) | | | | | | |
| PMAB37 | EVQLLE | ASTKGPSVFPLAPSS | GGGGSG | EVQLLES | GGGGSG | DIQMTQS | DIVMTQS | RTVAAPSV |
| | SGGGLV | KSTSGGTAALGCLVK | GGGSGG | GGGLVQP | GGGSGG | PSSLSAS | PDSLAVS | FIFPPSDE |
| | QPGGSL | DYFPEPVTVSWNSGA | GGS | GGSLRLS | GGSGGG | VGDRVTI | LGERATI | QLKSGTAS |
| | RLSCAA | LTSGVHTFPAVLQSS | (SEQ | CAASGFT | GS | TCRASQS | NCKSSQS | VVCLLNNF |
| | SGFTFS | GLYSLSSVVTVPSSS | ID NO: | FSDFWMH | (SEQ | VSSSLAW | VLYSPNN | YPREAKVQ |
| | NSDMSW | LGTQTYICNVNHKPS | 30) | WVRQAPG | ID NO: | YQQKPGK | KNYLAWY | WKVDNALQ |
| | VRQAPG | NTKVDKKVEPKSCDK | | KGLEWIS | 22) | APKLLIY | QQKPGQP | SGNSQESV |
| | KGLEWV | THTCPPCPAPEAAGA | | YISGDSG | | AASSLQS | PKLLIYW | TEQDSKDS |
| | SGITIS | PSVFLFPPKPKDTLM | | YTNYADS | | GVPSRFS | ASTRESG | TYSLSSTL |
| | GGSTYY | ISRTPEVTCVVVDVS | | VKGRFTI | | GSGSGTD | VPDRFSG | TLSKADYE |
| | ADSVKG | HEDPEVKFNWYVDGV | | SRDNSKN | | FTLTISS | SGSGTDF | KHKVYACE |
| | RFTISR | EVHNAKTKPREEQYN | | TLYLQMN | | LQPEDFA | TLTISSL | VTHQGLSS |
| | DNSKNT | STYRVVSVLTVLHQD | | SLRAEDT | | TYYCQQY | QAEDVAV | PVTKSFNR |
| | LYLQMN | WLNGKEYKCKVSNKA | | AVYYCAR | | KSYPVTF | YYCQQYY | GEC (SEQ |
| | SLRAED | LPAPIEKTISKAKGQ | | DRPYYYY | | GQGTKVE | TTPPTFG | ID NO: |
| | TAVYYC | PREPQVYTLPPSREE | | MDVWGKG | | IK (SEQ | QGTRLEI | 45) |
| | ARGRGG | MTKNQVSLTCLVKGF | | TTVTVSS | | ID NO: | K (SEQ | |
| | SGWLDY | YPSDIAVEWESNGQP | | (SEQ ID | | 1364) | ID NO: | |
| | WGQGTL | ENNYKTTPPVLDSDG | | NO: | | | 1359) | |
| | VTVSS | SFFLYSKLTVDKSRW | | 591) | | | | |
| | (SEQ | QQGNVFSCSVMHEAL | | | | | | |
| | ID NO: | HNHYTQKSLSLSPG | | | | | | |
| | 1438) | (SEQ ID NO: 44) | | | | | | |
| PMAB38 | EVQLLE | ASTKGPSVFPLAPSS | GGGGSG | EVQLLES | GGGGSG | DIQMTQS | DIVMTQS | RTVAAPSV |
| | SGGGLV | KSTSGGTAALGCLVK | GGGSGG | GGGLVQP | GGGSGG | PSSLSAS | PDSLAVS | FIFPPSDE |
| | QPGGSL | DYFPEPVTVSWNSGA | GGS | GGSLRLS | GGSGGG | VGDRVTI | LGERATI | QLKSGTAS |
| | RLSCAA | LTSGVHTFPAVLQSS | (SEQ | CAASGFT | GS | TCRASQS | NCKSSQS | VVCLLNNF |
| | SGFTFS | GLYSLSSVVTVPSSS | ID NO: | FSDFWMH | (SEQ | VSRYLAW | VLYSPNN | YPREAKVQ |
| | NSDMSW | LGTQTYICNVNHKPS | 30) | WVRQAPG | ID NO: | YQQKPGK | KNYLAWY | WKVDNALQ |
| | VRQAPG | NTKVDKKVEPKSCDK | | KGLEWIS | 22) | APKLLIY | QQKPGQP | SGNSQESV |
| | KGLEWV | THTCPPCPAPEAAGA | | YISGDSG | | AASSLQS | PKLLIYW | TEQDSKDS |
| | SGITIS | PSVFLFPPKPKDTLM | | YTNYADS | | GVPSRFS | ASTRESG | TYSLSSTL |
| | GGSTYY | ISRTPEVTCVVVDVS | | VKGRFTI | | GSGSGTD | VPDRFSG | TLSKADYE |
| | ADSVKG | HEDPEVKFNWYVDGV | | SRDNSKN | | FTLTISS | SGSGTDF | KHKVYACE |
| | RFTISR | EVHNAKTKPREEQYN | | TLYLQMN | | LQPEDFA | TLTISSL | VTHQGLSS |
| | DNSKNT | STYRVVSVLTVLHQD | | SLRAEDT | | TYYCQQY | QAEDVAV | PVTKSFNR |
| | LYLQMN | WLNGKEYKCKVSNKA | | AVYYCAR | | KSYPVTF | YYCQQYY | GEC (SEQ |
| | SLRAED | LPAPIEKTISKAKGQ | | DRPYYYY | | GQGTKVE | TTPPTFG | ID NO: |
| | TAVYYC | PREPQVYTLPPSREE | | MDVWGKG | | IK (SEQ | QGTRLEI | 45) |
| | ARGRGG | MTKNQVSLTCLVKGF | | TTVTVSS | | ID NO: | K (SEQ | |
| | SGWLDY | YPSDIAVEWESNGQP | | (SEQ ID | | 1365) | ID NO: | |
| | WGQGTL | ENNYKTTPPVLDSDG | | NO: | | | 1359) | |
| | VTVSS | SFFLYSKLTVDKSRW | | 591) | | | | |
| | (SEQ | QQGNVFSCSVMHEAL | | | | | | |
| | ID NO: | HNHYTQKSLSLSPG | | | | | | |
| | 1438) | (SEQ ID NO: 44) | | | | | | |
| PMAB | EVQLLE | ASTKGPSVFPLAPSS | GGGGSG | EVQLLES | GGGGSG | DIQMTQS | DIVMTQS | RTVAAPSV |
| 39 | SGGGLV | KSTSGGTAALGCLVK | GGGSGG | GGGLVQP | GGGSGG | PSSLSAS | PDSLAVS | FIFPPSDE |
| | QPGGSL | DYFPEPVTVSWNSGA | GGS | GGSLRLS | GGSGGG | VGDRVTI | LGERATI | QLKSGTAS |
| | RLSCAA | LTSGVHTFPAVLQSS | (SEQ | CAASGFT | GS | TCRASQS | NCKSSQS | VVCLLNNF |
| | SGFTFS | GLYSLSSVVTVPSSS | ID NO: | FSDFWMH | (SEQ | VSRSLNW | VLYSPNN | YPREAKVQ |
| | NSDMSW | LGTQTYICNVNHKPS | 30) | WVRQAPG | ID NO: | YQQKPGK | KNYLAWY | WKVDNALQ |
| | VRQAPG | NTKVDKKVEPKSCDK | | KGLEWIS | 22) | APKLLIY | QQKPGQP | SGNSQESV |
| | KGLEWV | THTCPPCPAPEAAGA | | YISGDSG | | AASSLQS | PKLLIYW | TEQDSKDS |
| | SGITIS | PSVFLFPPKPKDTLM | | YTNYADS | | GVPSRFS | ASTRESG | TYSLSSTL |
| | GGSTYY | ISRTPEVTCVVVDVS | | VKGRFTI | | GSGSGTD | VPDRFSG | TLSKADYE |
| | ADSVKG | HEDPEVKFNWYVDGV | | SRDNSKN | | FTLTISS | SGSGTDF | KHKVYACE |
| | RFTISR | EVHNAKTKPREEQYN | | TLYLQMN | | LQPEDFA | TLTISSL | VTHQGLSS |
| | DNSKNT | STYRVVSVLTVLHQD | | SLRAEDT | | TYYCQQY | QAEDVAV | PVTKSFNR |
| | LYLQMN | WLNGKEYKCKVSNKA | | AVYYCAR | | KSYPVTF | YYCQQYY | GEC (SEQ |
| | SLRAED | LPAPIEKTISKAKGQ | | DRPYYYY | | GQGTKVE | TTPPTFG | ID NO: |
| | TAVYYC | PREPQVYTLPPSREE | | MDVWGKG | | IK (SEQ | QGTRLEI | 45) |
| | ARGRGG | MTKNQVSLTCLVKGF | | TTVTVSS | | ID NO: | K (SEQ | |
| | SGWLDY | YPSDIAVEWESNGQP | | (SEQ ID | | 1366) | ID NO: | |
| | WGQGTL | ENNYKTTPPVLDSDG | | NO: | | | 1359) | |
| | VTVSS | SFFLYSKLTVDKSRW | | 591) | | | | |
| | (SEQ | QQGNVFSCSVMHEAL | | | | | | |
| | ID NO: | HNHYTQKSLSLSPG | | | | | | |
| | 1438) | (SEQ ID NO: 44) | | | | | | |
| PMAB | EVQLLE | ASTKGPSVFPLAPSS | GGGGSG | EVQLLES | GGGGSG | DIQMTQS | DIVMTQS | RTVAAPSV |
| 40 | SGGGLV | KSTSGGTAALGCLVK | GGGSGG | GGGLVQP | GGGSGG | PSSLSAS | PDSLAVS | FIFPPSDE |
| | QPGGSL | DYFPEPVTVSWNSGA | GGS | GGSLRLS | GGSGGG | VGDRVTI | LGERATI | QLKSGTAS |
| | RLSCAA | LTSGVHTFPAVLQSS | (SEQ | CAASGFT | GS | TCRASQS | NCKSSQS | VVCLLNNF |
| | SGFTFS | GLYSLSSVVTVPSSS | ID NO: | FSDFWMH | (SEQ | VSRSLAW | VLYSPNN | YPREAKVQ |
| | NSDMSW | LGTQTYICNVNHKPS | 30) | WVRQAPG | ID NO: | YQQKPGK | KNYLAWY | WKVDNALQ |
| | VRQAPG | NTKVDKKVEPKSCDK | | KGLEWIS | 22) | APKLLIY | QQKPGQP | SGNSQESV |
| | KGLEWV | THTCPPCPAPEAAGA | | YISGDSG | | AASSLQS | PKLLIYW | TEQDSKDS |
| | SGITIS | PSVFLFPPKPKDTLM | | YTNYADS | | GVPSRFS | ASTRESG | TYSLSSTL |
| | GGSTYY | ISRTPEVTCVVVDVS | | VKGRFTI | | GSGSGTD | VPDRFSG | TLSKADYE |
| | ADSVKG | HEDPEVKFNWYVDGV | | SRDNSKN | | FTLTISS | SGSGTDF | KHKVYACE |
| | RFTISR | EVHNAKTKPREEQYN | | TLYLQMN | | LQPEDFA | TLTISSL | VTHQGLSS |
| | DNSKNT | STYRVVSVLTVLHQD | | SLRAEDT | | TYYCQQS | QAEDVAV | PVTKSFNR |
| | LYLQMN | WLNGKEYKCKVSNKA | | AVYYCAR | | KSYPVTF | YYCQQYY | GEC (SEQ |
| | SLRAED | LPAPIEKTISKAKGQ | | DRPYYYY | | GQGTKVE | TTPPTFG | ID NO: |
| | TAVYYC | PREPQVYTLPPSREE | | MDVWGKG | | IK (SEQ | QGTRLEI | 45) |
| | ARGRGG | MTKNQVSLTCLVKGF | | TTVTVSS | | ID NO: | K (SEQ | |
| | SGWLDY | YPSDIAVEWESNGQP | | (SEQ ID | | 1464) | ID NO: | |
| | WGQGTL | ENNYKTTPPVLDSDG | | NO: | | | 1359) | |
| | VTVSS | SFFLYSKLTVDKSRW | | 591) | | | | |
| | (SEQ | QQGNVFSCSVMHEAL | | | | | | |
| | ID NO: | HNHYTQKSLSLSPG | | | | | | |
| | 1438) | (SEQ ID NO: 44) | | | | | | |
| PMAB41 | EVQLLE | ASTKGPSVFPLAPSS | GGGGSG | EVQLLES | GGGGSG | DIQMTQS | DIVMTQS | RTVAAPSV |
| | SGGGLV | KSTSGGTAALGCLVK | GGGSGG | GGGLVQP | GGGSGG | PSSLSAS | PDSLAVS | FIFPPSDE |
| | QPGGSL | DYFPEPVTVSWNSGA | GGS | GGSLRLS | GGSGGG | VGDRVTI | LGERATI | QLKSGTAS |
| | RLSCAA | LTSGVHTFPAVLQSS | (SEQ | CAASGFT | GS | TCRASQS | NCKSSQS | VVCLLNNF |
| | SGFTFS | GLYSLSSVVTVPSSS | ID NO: | FSDFWMH | (SEQ | VSRSLAW | VLYSPNN | YPREAKVQ |
| | NSDMSW | LGTQTYICNVNHKPS | 30) | WVRQAPG | ID NO: | YQQKPGK | KNYLAWY | WKVDNALQ |
| | VRQAPG | NTKVDKKVEPKSCDK | | KGLEWIS | 22) | APKLLIY | QQKPGQP | SGNSQESV |
| | KGLEWV | THTCPPCPAPEAAGA | | YISGDSG | | AASSLQS | PKLLIYW | TEQDSKDS |
| | SGITIS | PSVFLFPPKPKDTLM | | YTNYADS | | GVPSRFS | ASTRESG | TYSLSSTL |
| | GGSTYY | ISRTPEVTCVVVDVS | | VKGRFTI | | GSGSGTD | VPDRFSG | TLSKADYE |
| | ADSVKG | HEDPEVKFNWYVDGV | | SRDNSKN | | FTLTISS | SGSGTDF | KHKVYACE |
| | RFTISR | EVHNAKTKPREEQYN | | TLYLQMN | | LQPEDFA | TLTISSL | VTHQGLSS |
| | DNSKNT | STYRVVSVLTVLHQD | | SLRAEDT | | TYYCQQY | QAEDVAV | PVTKSFNR |
| | LYLQMN | WLNGKEYKCKVSNKA | | AVYYCAR | | YSYPVTF | YYCQQYY | GEC (SEQ |
| | SLRAED | LPAPIEKTISKAKGQ | | DRPYYYY | | GQGTKVE | TTPPTFG | ID NO: |
| | TAVYYC | PREPQVYTLPPSREE | | MDVWGKG | | IK (SEQ | QGTRLEI | 45) |
| | ARGRGG | MTKNQVSLTCLVKGF | | TTVTVSS | | ID NO: | K (SEQ | |
| | SGWLDY | YPSDIAVEWESNGQP | | (SEQ ID | | 1465) | ID NO: | |
| | WGQGTL | ENNYKTTPPVLDSDG | | NO: | | | 1359) | |
| | VTVSS | SFFLYSKLTVDKSRW | | 591) | | | | |
| | (SEQ | QQGNVFSCSVMHEAL | | | | | | |
| | ID NO: | HNHYTQKSLSLSPG | | | | | | |
| | 1438) | (SEQ ID NO: 44) | | | | | | |
| PMAB42 | EVQLLE | ASTKGPSVFPLAPSS | GGGGSG | EVQLLES | GGGGSG | DIQMTQS | DIVMTQS | RTVAAPSV |
| | SGGGLV | KSTSGGTAALGCLVK | GGGSGG | GGGLVQP | GGGSGG | PSSLSAS | PDSLAVS | FIFPPSDE |
| | QPGGSL | DYFPEPVTVSWNSGA | GGS | GGSLRLS | GGSGGG | VGDRVTI | LGERATI | QLKSGTAS |
| | RLSCAA | LTSGVHTFPAVLQSS | (SEQ | CAASGFT | GS | TCRASQS | NCKSSQS | VVCLLNNF |
| | SGFTFS | GLYSLSSVVTVPSSS | ID NO: | FSDFWMH | (SEQ | VSRSLAW | VLYSPNN | YPREAKVQ |
| | NSDMSW | LGTQTYICNVNHKPS | 30) | WVRQAPG | ID NO: | YQQKPGK | KNYLAWY | WKVDNALQ |
| | VRQAPG | NTKVDKKVEPKSCDK | | KGLEWIS | 22) | APKLLIY | QQKPGQP | SGNSQESV |
| | KGLEWV | THTCPPCPAPEAAGA | | YISGDSG | | AASSLQS | PKLLIYW | TEQDSKDS |
| | SGITIS | PSVFLFPPKPKDTLM | | YTNYADS | | GVPSRFS | ASTRESG | TYSLSSTL |
| | GGSTYY | ISRTPEVTCVVVDVS | | VKGRFTI | | GSGSGTD | VPDRFSG | TLSKADYE |
| | ADSVKG | HEDPEVKFNWYVDGV | | SRDNSKN | | FTLTISS | SGSGTDF | KHKVYACE |
| | RFTISR | EVHNAKTKPREEQYN | | TLYLQMN | | LQPEDFA | TLTISSL | VTHQGLSS |
| | DNSKNT | STYRVVSVLTVLHQD | | SLRAEDT | | TYYCQQY | QAEDVAV | PVTKSFNR |
| | LYLQMN | WLNGKEYKCKVSNKA | | AVYYCAR | | KSTPVTF | YYCQQYY | GEC (SEQ |
| | SLRAED | LPAPIEKTISKAKGQ | | DRPYYYY | | GQGTKVE | TTPPTFG | ID NO: |
| | TAVYYC | PREPQVYTLPPSREE | | MDVWGKG | | IK (SEQ | QGTRLEI | 45) |
| | ARGRGG | MTKNQVSLTCLVKGF | | TTVTVSS | | ID NO: | K (SEQ | |
| | SGWLDY | YPSDIAVEWESNGQP | | (SEQ ID | | 1466) | ID NO: | |
| | WGQGTL | ENNYKTTPPVLDSDG | | NO: | | | 1359) | |
| | VTVSS | SFFLYSKLTVDKSRW | | 591) | | | | |
| | (SEQ | QQGNVFSCSVMHEAL | | | | | | |
| | ID NO: | HNHYTQKSLSLSPG | | | | | | |
| | 1438) | (SEQ ID NO: 44) | | | | | | |
| PMAB43 | EVQLLE | ASTKGPSVFPLAPSS | GGGGSG | EVQLLES | GGGGSG | DIQMTQS | DIVMTQS | RTVAAPSV |
| | SGGGLV | KSTSGGTAALGCLVK | GGGSGG | GGGLVQP | GGGSGG | PSSLSAS | PDSLAVS | FIFPPSDE |
| | QPGGSL | DYFPEPVTVSWNSGA | GGS | GGSLRLS | GGSGGG | VGDRVTI | LGERATI | QLKSGTAS |
| | RLSCAA | LTSGVHTFPAVLQSS | (SEQ | CAASGFT | GS | TCRASQS | NCKSSQS | VVCLLNNF |
| | SGFTFS | GLYSLSSVVTVPSSS | ID NO: | FSDFWMH | (SEQ | VSRSLAW | VLYSPNN | YPREAKVQ |
| | NSDMSW | LGTQTYICNVNHKPS | 30) | WVRQAPG | ID NO: | YQQKPGK | KNYLAWY | WKVDNALQ |
| | VRQAPG | NTKVDKKVEPKSCDK | | KGLEWIS | 22) | APKLLIY | QQKPGQP | SGNSQESV |
| | KGLEWV | THTCPPCPAPEAAGA | | YISGDSG | | AASSLQS | PKLLIYW | TEQDSKDS |
| | SGITIS | PSVFLFPPKPKDTLM | | YTNYADS | | GVPSRFS | ASTRESG | TYSLSSTL |
| | GGSTYY | ISRTPEVTCVVVDVS | | VKGRFTI | | GSGSGTD | VPDRFSG | TLSKADYE |
| | ADSVKG | HEDPEVKFNWYVDGV | | SRDNSKN | | FTLTISS | SGSGTDF | KHKVYACE |
| | RFTISR | EVHNAKTKPREEQYN | | TLYLQMN | | LQPEDFA | TLTISSL | VTHQGLSS |
| | DNSKNT | STYRVVSVLTVLHQD | | SLRAEDT | | TYYCQQY | QAEDVAV | PVTKSFNR |
| | LYLQMN | WLNGKEYKCKVSNKA | | AVYYCAR | | KSYPRTF | YYCQQYY | GEC (SEQ |
| | SLRAED | LPAPIEKTISKAKGQ | | DRPYYYY | | GQGTKVE | TTPPTFG | ID NO: |
| | TAVYYC | PREPQVYTLPPSREE | | MDVWGKG | | IK (SEQ | QGTRLEI | 45) |
| | ARGRGG | MTKNQVSLTCLVKGF | | TTVTVSS | | ID NO: | K (SEQ | |
| | SGWLDY | YPSDIAVEWESNGQP | | (SEQ ID | | | ID NO: | |
| | WGQGTL | ENNYKTTPPVLDSDG | | NO: | | 1467) | 1359) | |
| | VTVSS | SFFLYSKLTVDKSRW | | 591) | | | | |
| | (SEQ | QQGNVFSCSVMHEAL | | | | | | |
| | ID NO: | HNHYTQKSLSLSPG | | | | | | |
| | 1438) | (SEQ ID NO: 44) | | | | | | |
| PMAB44 | EVQLLE | ASTKGPSVFPLAPSS | GGGGSG | EVQLLES | GGGGSG | DIQMTQS | DIVMTQS | RTVAAPSV |
| | SGGGLV | KSTSGGTAALGCLVK | GGGSGG | GGGLVQP | GGGSGG | PSSLSAS | PDSLAVS | FIFPPSDE |
| | QPGGSL | DYFPEPVTVSWNSGA | GGS | GGSLRLS | GGSGGG | VGDRVTI | LGERATI | QLKSGTAS |
| | RLSCAA | LTSGVHTFPAVLQSS | (SEQ | CAASGFT | GS | TCRASQS | NCKSSQS | VVCLLNNF |
| | SGFTFS | GLYSLSSVVTVPSSS | ID NO: | FSDFWMH | (SEQ | VSRSLAW | VLYSPNN | YPREAKVQ |
| | NSDMSW | LGTQTYICNVNHKPS | 30) | WVRQAPG | ID NO: | YQQKPGK | KNYLAWY | WKVDNALQ |
| | VRQAPG | NTKVDKKVEPKSCDK | | KGLEWIS | 22) | APKLLIY | QQKPGQP | SGNSQESV |
| | KGLEWV | THTCPPCPAPEAAGA | | YISGDSG | | AASSLQS | PKLLIYW | TEQDSKDS |
| | SGITIS | PSVFLFPPKPKDTLM | | YTNYADS | | GVPSRFS | ASTRESG | TYSLSSTL |
| | GGSTYY | ISRTPEVTCVVVDVS | | VKGRFTI | | GSGSGTD | VPDRFSG | TLSKADYE |
| | ADSVKG | HEDPEVKFNWYVDGV | | SRDNSKN | | FTLTISS | SGSGTDF | KHKVYACE |
| | RFTISR | EVHNAKTKPREEQYN | | TLYLQMN | | LQPEDFA | TLTISSL | VTHQGLSS |
| | DNSKNT | STYRVVSVLTVLHQD | | SLRAEDT | | TYYCQQY | QAEDVAV | PVTKSFNR |
| | LYLQMN | WLNGKEYKCKVSNKA | | AVYYCAR | | KSYPVTF | YYCQQYY | GEC (SEQ |
| | SLRAED | LPAPIEKTISKAKGQ | | DRPTYYY | | GQGTKVE | TTPPTFG | ID NO: |
| | TAVYYC | PREPQVYTLPPSREE | | MDVWGKG | | IK (SEQ | QGTRLEI | 45) |
| | ARGRGG | MTKNQVSLTCLVKGF | | TTVTVSS | | ID NO: | K (SEQ | |
| | SGWLDY | YPSDIAVEWESNGQP | | (SEQ ID | | 592) | ID NO: | |
| | WGQGTL | ENNYKTTPPVLDSDG | | NO: | | | 1359) | |
| | VTVSS | SFFLYSKLTVDKSRW | | 1390) | | | | |
| | (SEQ | QQGNVFSCSVMHEAL | | | | | | |
| | ID NO: | HNHYTQKSLSLSPG | | | | | | |
| | 1438) | (SEQ ID NO: 44) | | | | | | |
| PMAB45 | EVQLLE | ASTKGPSVFPLAPSS | GGGGSG | EVQLLES | GGGGSG | DIQMTQS | DIVMTQS | RTVAAPSV |
| | SGGGLV | KSTSGGTAALGCLVK | GGGSGG | GGGLVQP | GGGSGG | PSSLSAS | PDSLAVS | FIFPPSDE |
| | QPGGSL | DYFPEPVTVSWNSGA | GGS | GGSLRLS | GGSGGG | VGDRVTI | LGERATI | QLKSGTAS |
| | RLSCAA | LTSGVHTFPAVLQSS | (SEQ | CAASGFT | GS | TCRASQS | NCKSSQS | VVCLLNNF |
| | SGFTFS | GLYSLSSVVTVPSSS | ID NO: | FSDFWMH | (SEQ | VSRSLAW | VLYSPNN | YPREAKVQ |
| | NSDMSW | LGTQTYICNVNHKPS | 30) | WVRQAPG | ID NO: | YQQKPGK | KNYLAWY | WKVDNALQ |
| | VRQAPG | NTKVDKKVEPKSCDK | | KGLEWIS | 22) | APKLLIY | QQKPGQP | SGNSQESV |
| | KGLEWV | THTCPPCPAPEAAGA | | YISGDSG | | AASSLQS | PKLLIYW | TEQDSKDS |
| | SGITIS | PSVFLFPPKPKDTLM | | YTNYADS | | GVPSRFS | ASTRESG | TYSLSSTL |
| | GGSTYY | ISRTPEVTCVVVDVS | | VKGRFTI | | GSGSGTD | VPDRFSG | TLSKADYE |
| | ADSVKG | HEDPEVKFNWYVDGV | | SRDNSKN | | FTLTISS | SGSGTDF | KHKVYACE |
| | RFTISR | EVHNAKTKPREEQYN | | TLYLQMN | | LQPEDFA | TLTISSL | VTHQGLSS |
| | DNSKNT | STYRVVSVLTVLHQD | | SLRAEDT | | TYYCQQY | QAEDVAV | PVTKSFNR |
| | LYLQMN | WLNGKEYKCKVSNKA | | AVYYCAR | | KSYPVTF | YYCQQYY | GEC (SEQ |
| | SLRAED | LPAPIEKTISKAKGQ | | DRPYDYY | | GQGTKVE | TTPPTFG | ID NO: |
| | TAVYYC | PREPQVYTLPPSREE | | MDVWGKG | | IK (SEQ | QGTRLEI | 45) |
| | ARGRGG | MTKNQVSLTCLVKGF | | TTVTVSS | | ID NO: | K (SEQ | |
| | SGWLDY | YPSDIAVEWESNGQP | | (SEQ ID | | 592) | ID NO: | |
| | WGQGTL | ENNYKTTPPVLDSDG | | NO: | | | 1359) | |
| | VTVSS | SFFLYSKLTVDKSRW | | 1468) | | | | |
| | (SEQ | QQGNVFSCSVMHEAL | | | | | | |
| | ID NO: | HNHYTQKSLSLSPG | | | | | | |
| | 1438) | (SEQ ID NO: 44) | | | | | | |
| PMAB46 | EVQLLE | ASTKGPSVFPLAPSS | GGGGSG | EVQLLES | GGGGSG | DIQMTQS | DIVMTQS | RTVAAPSV |
| | SGGGLV | KSTSGGTAALGCLVK | GGGSGG | GGGLVQP | GGGSGG | PSSLSAS | PDSLAVS | FIFPPSDE |
| | QPGGSL | DYFPEPVTVSWNSGA | GGS | GGSLRLS | GGSGGG | VGDRVTI | LGERATI | QLKSGTAS |
| | RLSCAA | LTSGVHTFPAVLQSS | (SEQ | CAASGFT | GS | TCRASQS | NCKSSQS | VVCLLNNF |
| | SGFTFS | GLYSLSSVVTVPSSS | ID NO: | FSDFWMH | (SEQ | VSRSLAW | VLYSPNN | YPREAKVQ |
| | NSDMSW | LGTQTYICNVNHKPS | 30) | WVRQAPG | ID NO: | YQQKPGK | KNYLAWY | WKVDNALQ |
| | VRQAPG | NTKVDKKVEPKSCDK | | KGLEWIS | 22) | APKLLIY | QQKPGQP | SGNSQESV |
| | KGLEWV | THTCPPCPAPEAAGA | | YISGDSG | | AASSLQS | PKLLIYW | TEQDSKDS |
| | SGITIS | PSVFLFPPKPKDTLM | | YTNYADS | | GVPSRFS | ASTRESG | TYSLSSTL |
| | GGSTYY | ISRTPEVTCVVVDVS | | VKGRFTI | | GSGSGTD | VPDRFSG | TLSKADYE |
| | ADSVKG | HEDPEVKFNWYVDGV | | SRDNSKN | | FTLTISS | SGSGTDF | KHKVYACE |
| | RFTISR | EVHNAKTKPREEQYN | | TLYLQMN | | LQPEDFA | TLTISSL | VTHQGLSS |
| | DNSKNT | STYRVVSVLTVLHQD | | SLRAEDT | | TYYCQQY | QAEDVAV | PVTKSFNR |
| | LYLQMN | WLNGKEYKCKVSNKA | | AVYYCAR | | KSYPVTF | YYCQQYY | GEC (SEQ |
| | SLRAED | LPAPIEKTISKAKGQ | | DRPYGYY | | GQGTKVE | TTPPTFG | ID NO: |
| | TAVYYC | PREPQVYTLPPSREE | | MDVWGKG | | IK (SEQ | QGTRLEI | 45) |
| | ARGRGG | MTKNQVSLTCLVKGF | | TTVTVSS | | ID NO: | K (SEQ | |
| | SGWLDY | YPSDIAVEWESNGQP | | (SEQ ID | | 592) | ID NO: | |
| | WGQGTL | ENNYKTTPPVLDSDG | | NO: | | | 1359) | |
| | VTVSS | SFFLYSKLTVDKSRW | | 1469) | | | | |
| | (SEQ | QQGNVFSCSVMHEAL | | | | | | |
| | ID NO: | HNHYTQKSLSLSPG | | | | | | |
| | 1438) | (SEQ ID NO: 44) | | | | | | |
| PMAB47 | EVQLLE | ASTKGPSVFPLAPSS | GGGGSG | EVQLLES | GGGGSG | DIQMTQS | DIVMTQS | RTVAAPSV |
| | SGGGLV | KSTSGGTAALGCLVK | GGGSGG | GGGLVQP | GGGSGG | PSSLSAS | PDSLAVS | FIFPPSDE |
| | QPGGSL | DYFPEPVTVSWNSGA | GGS | GGSLRLS | GGSGGG | VGDRVTI | LGERATI | QLKSGTAS |
| | RLSCAA | LTSGVHTFPAVLQSS | (SEQ | CAASGFT | GS | TCRASQS | NCKSSQS | VVCLLNNF |
| | SGFTFS | GLYSLSSVVTVPSSS | ID NO: | FSDFWMH | (SEQ | VSRSLAW | VLYSPNN | YPREAKVQ |
| | NSDMSW | LGTQTYICNVNHKPS | 30) | WVRQAPG | ID NO: | YQQKPGK | KNYLAWY | WKVDNALQ |
| | VRQAPG | NTKVDKKVEPKSCDK | | KGLEWIS | 22) | APKLLIY | QQKPGQP | SGNSQESV |
| | KGLEWV | THTCPPCPAPEAAGA | | YISGDSG | | AASSLQS | PKLLIYW | TEQDSKDS |
| | SGITIS | PSVFLFPPKPKDTLM | | YTNYADS | | GVPSRFS | ASTRESG | TYSLSSTL |
| | GGSTYY | ISRTPEVTCVVVDVS | | VKGRFTI | | GSGSGTD | VPDRFSG | TLSKADYE |
| | ADSVKG | HEDPEVKFNWYVDGV | | SRDNSKN | | FTLTISS | SGSGTDF | KHKVYACE |
| | RFTISR | EVHNAKTKPREEQYN | | TLYLQMN | | LQPEDFA | TLTISSL | VTHQGLSS |
| | DNSKNT | STYRVVSVLTVLHQD | | SLRAEDT | | TYYCQQY | QAEDVAV | PVTKSFNR |
| | LYLQMN | WLNGKEYKCKVSNKA | | AVYYCAR | | KSYPVTF | YYCQQYY | GEC (SEQ |
| | SLRAED | LPAPIEKTISKAKGQ | | DRPYNYY | | GQGTKVE | TTPPTFG | ID NO: |
| | TAVYYC | PREPQVYTLPPSREE | | MDVWGKG | | IK (SEQ | QGTRLEI | 45) |
| | ARGRGG | MTKNQVSLTCLVKGF | | TTVTVSS | | ID NO: | K (SEQ | |
| | SGWLDY | YPSDIAVEWESNGQP | | (SEQ ID | | 592) | ID NO: | |
| | WGQGTL | ENNYKTTPPVLDSDG | | NO: | | | 1359) | |
| | VTVSS | SFFLYSKLTVDKSRW | | 1470) | | | | |
| | (SEQ | QQGNVFSCSVMHEAL | | | | | | |
| | ID NO: | HNHYTQKSLSLSPG | | | | | | |
| | 1438) | (SEQ ID NO: 44) | | | | | | |
| PMAB48 | EVQLLE | ASTKGPSVFPLAPSS | GGGGSG | EVQLLES | GGGGSG | DIQMTQS | DIVMTQS | RTVAAPSV |
| | SGGGLV | KSTSGGTAALGCLVK | GGGSGG | GGGLVQP | GGGSGG | PSSLSAS | PDSLAVS | FIFPPSDE |
| | QPGGSL | DYFPEPVTVSWNSGA | GGS | GGSLRLS | GGSGGG | VGDRVTI | LGERATI | QLKSGTAS |
| | RLSCAA | LTSGVHTFPAVLQSS | (SEQ | CAASGFT | GS | TCRASQS | NCKSSQS | VVCLLNNF |
| | SGFTFS | GLYSLSSVVTVPSSS | ID NO: | FSDFWMH | (SEQ | VSRSLAW | VLYSPNN | YPREAKVQ |
| | NSDMSW | LGTQTYICNVNHKPS | 30) | WVRQAPG | ID NO: | YQQKPGK | KNYLAWY | WKVDNALQ |
| | VRQAPG | NTKVDKKVEPKSCDK | | KGLEWIS | 22) | APKLLIY | QQKPGQP | SGNSQESV |
| | KGLEWV | THTCPPCPAPEAAGA | | YISGDSG | | AASSLQS | PKLLIYW | TEQDSKDS |
| | SGITIS | PSVFLFPPKPKDTLM | | YTNYADS | | GVPSRFS | ASTRESG | TYSLSSTL |
| | GGSTYY | ISRTPEVTCVVVDVS | | VKGRFTI | | GSGSGTD | VPDRFSG | TLSKADYE |
| | ADSVKG | HEDPEVKFNWYVDGV | | SRDNSKN | | FTLTISS | SGSGTDF | KHKVYACE |
| | RFTISR | EVHNAKTKPREEQYN | | TLYLQMN | | LQPEDFA | TLTISSL | VTHQGLSS |
| | DNSKNT | STYRVVSVLTVLHQD | | SLRAEDT | | TYYCQQY | QAEDVAV | PVTKSFNR |
| | LYLQMN | WLNGKEYKCKVSNKA | | AVYYCAR | | KSYPVTF | YYCQQYY | GEC (SEQ |
| | SLRAED | LPAPIEKTISKAKGQ | | DRPYSYY | | GQGTKVE | TPPTFG | ID NO: |
| | TAVYYC | PREPQVYTLPPSREE | | MDVWGKG | | IK (SEQ | QGTRLEI | 45) |
| | ARGRGG | MTKNQVSLTCLVKGF | | TTVTVSS | | ID NO: | K (SEQ | |
| | SGWLDY | YPSDIAVEWESNGQP | | (SEQ ID | | 592) | ID NO: | |
| | WGQGTL | ENNYKTTPPVLDSDG | | NO: | | | 1359) | |
| | VTVSS | SFFLYSKLTVDKSRW | | 1471) | | | | |
| | (SEQ | QQGNVFSCSVMHEAL | | | | | | |
| | ID NO: | HNHYTQKSLSLSPG | | | | | | |
| | 1438) | (SEQ ID NO: 44) | | | | | | |
| PMAB49 | EVQLLE | ASTKGPSVFPLAPSS | GGGGSG | EVQLLES | GGGGSG | DIQMTQS | DIVMTQS | RTVAAPSV |
| | SGGGLV | KSTSGGTAALGCLVK | GGGSGG | GGGLVQP | GGGSGG | PSSLSAS | PDSLAVS | FIFPPSDE |
| | QPGGSL | DYFPEPVTVSWNSGA | GGS | GGSLRLS | GGSGGG | VGDRVTI | LGERATI | QLKSGTAS |
| | RLSCAA | LTSGVHTFPAVLQSS | (SEQ | CAASGFT | GS | TCRASQS | NCKSSQS | VVCLLNNF |
| | SGFTFS | GLYSLSSVVTVPSSS | ID NO: | FSDFWMH | (SEQ | VSRSLAW | VLYSPNN | YPREAKVQ |
| | NSDMSW | LGTQTYICNVNHKPS | 30) | WVRQAPG | ID NO: | YQQKPGK | KNYLAWY | WKVDNALQ |
| | VRQAPG | NTKVDKKVEPKSCDK | | KGLEWIS | 22) | APKLLIY | QQKPGQP | SGNSQESV |
| | KGLEWV | THTCPPCPAPEAAGA | | YISGDSG | | AASSLQS | PKLLIYW | TEQDSKDS |
| | SGITIS | PSVFLFPPKPKDTLM | | YTNYADS | | GVPSRFS | ASTRESG | TYSLSSTL |
| | GGSTYY | ISRTPEVTCVVVDVS | | VKGRFTI | | GSGSGTD | VPDRFSG | TLSKADYE |
| | ADSVKG | HEDPEVKFNWYVDGV | | SRDNSKN | | FTLTISS | SGSGTDF | KHKVYACE |
| | RFTISR | EVHNAKTKPREEQYN | | TLYLQMN | | LQPEDFA | TLTISSL | VTHQGLSS |
| | DNSKNT | STYRVVSVLTVLHQD | | SLRAEDT | | TYYCQQY | QAEDVAV | PVTKSFNR |
| | LYLQMN | WLNGKEYKCKVSNKA | | AVYYCAR | | KSYPVTF | YYCQQYY | GEC (SEQ |
| | SLRAED | LPAPIEKTISKAKGQ | | DRPYYYD | | GQGTKVE | TTPPTFG | ID NO: |
| | TAVYYC | PREPQVYTLPPSREE | | MDVWGKG | | IK (SEQ | QGTRLEI | 45) |
| | ARGRGG | MTKNQVSLTCLVKGF | | TTVTVSS | | ID NO: | K (SEQ | |
| | SGWLDY | YPSDIAVEWESNGQP | | (SEQ ID | | 592) | ID NO: | |
| | WGQGTL | ENNYKTTPPVLDSDG | | NO: | | | 1359) | |
| | VTVSS | SFFLYSKLTVDKSRW | | 1472) | | | | |
| | (SEQ | QQGNVFSCSVMHEAL | | | | | | |
| | ID NO: | HNHYTQKSLSLSPG | | | | | | |
| | 1438) | (SEQ ID NO: 44) | | | | | | |
| PMAB50 | EVQLLE | ASTKGPSVFPLAPSS | GGGGSG | EVQLLES | GGGGSG | DIQMTQS | DIVMTQS | RTVAAPSV |
| | SGGGLV | KSTSGGTAALGCLVK | GGGSGG | GGGLVQP | GGGSGG | PSSLSAS | PDSLAVS | FIFPPSDE |
| | QPGGSL | DYFPEPVTVSWNSGA | GGS | GGSLRLS | GGSGGG | VGDRVTI | LGERATI | QLKSGTAS |
| | RLSCAA | LTSGVHTFPAVLQSS | (SEQ | CAASGFT | GS | TCRASQS | NCKSSQS | VVCLLNNF |
| | SGFTFS | GLYSLSSVVTVPSSS | ID NO: | FSDFWMH | (SEQ | VSRSLAW | VLYSPNN | YPREAKVQ |
| | NSDMSW | LGTQTYICNVNHKPS | 30) | WVRQAPG | ID NO: | YQQKPGK | KNYLAWY | WKVDNALQ |
| | VRQAPG | NTKVDKKVEPKSCDK | | KGLEWIS | 22) | APKLLIY | QQKPGQP | SGNSQESV |
| | KGLEWV | THTCPPCPAPEAAGA | | YISGDSG | | AASSLQS | PKLLIYW | TEQDSKDS |
| | SGITIS | PSVFLFPPKPKDTLM | | YTNYADS | | GVPSRFS | ASTRESG | TYSLSSTL |
| | GGSTYY | ISRTPEVTCVVVDVS | | VKGRFTI | | GSGSGTD | VPDRFSG | TLSKADYE |
| | ADSVKG | HEDPEVKFNWYVDGV | | SRDNSKN | | FTLTISS | SGSGTDF | KHKVYACE |
| | RFTISR | EVHNAKTKPREEQYN | | TLYLQMN | | LQPEDFA | TLTISSL | VTHQGLSS |
| | DNSKNT | STYRVVSVLTVLHQD | | SLRAEDT | | TYYCQQY | QAEDVAV | PVTKSFNR |
| | LYLQMN | WLNGKEYKCKVSNKA | | AVYYCAR | | KSYPVTF | YYCQQYY | GEC (SEQ |
| | SLRAED | LPAPIEKTISKAKGQ | | DRPYYYE | | GQGTKVE | TTPPTFG | ID NO: |
| | TAVYYC | PREPQVYTLPPSREE | | MDVWGKG | | IK (SEQ | QGTRLEI | 45) |
| | ARGRGG | MTKNQVSLTCLVKGF | | TTVTVSS | | ID NO: | K (SEQ | |
| | SGWLDY | YPSDIAVEWESNGQP | | (SEQ ID | | 592) | ID NO: | |
| | WGQGTL | ENNYKTTPPVLDSDG | | NO: | | | 1359) | |
| | VTVSS | SFFLYSKLTVDKSRW | | 1473) | | | | |
| | (SEQ | QQGNVFSCSVMHEAL | | | | | | |
| | ID NO: | HNHYTQKSLSLSPG | | | | | | |
| | 1438) | (SEQ ID NO: 44) | | | | | | |
| PMAB51 | EVQLLE | ASTKGPSVFPLAPSS | GGGGSG | EVQLLES | GGGGSG | DIQMTQS | DIVMTQS | RTVAAPSV |
| | SGGGLV | KSTSGGTAALGCLVK | GGGSGG | GGGLVQP | GGGSGG | PSSLSAS | PDSLAVS | FIFPPSDE |
| | QPGGSL | DYFPEPVTVSWNSGA | GGS | GGSLRLS | GGSGGG | VGDRVTI | LGERATI | QLKSGTAS |
| | RLSCAA | LTSGVHTFPAVLQSS | (SEQ | CAASGFT | GS | TCRASQS | NCKSSQS | VVCLLNNF |
| | SGFTFS | GLYSLSSVVTVPSSS | ID NO: | FSDFWMH | (SEQ | VSRSLAW | VLYSPNN | YPREAKVQ |
| | NSDMSW | LGTQTYICNVNHKPS | 30) | WVRQAPG | ID NO: | YQQKPGK | KNYLAWY | WKVDNALQ |
| | VRQAPG | NTKVDKKVEPKSCDK | | KGLEWIS | 22) | APKLLIY | QQKPGQP | SGNSQESV |
| | KGLEWV | THTCPPCPAPEAAGA | | YISGDSG | | AASSLQS | PKLLIYW | TEQDSKDS |
| | SGITIS | PSVFLFPPKPKDTLM | | YTNYADS | | GVPSRFS | ASTRESG | TYSLSSTL |
| | GGSTYY | ISRTPEVTCVVVDVS | | VKGRFTI | | GSGSGTD | VPDRFSG | TLSKADYE |
| | ADSVKG | HEDPEVKFNWYVDGV | | SRDNSKN | | FTLTISS | SGSGTDF | KHKVYACE |
| | RFTISR | EVHNAKTKPREEQYN | | TLYLQMN | | LQPEDFA | TLTISSL | VTHQGLSS |
| | DNSKNT | STYRVVSVLTVLHQD | | SLRAEDT | | TYYCQQY | QAEDVAV | PVTKSFNR |
| | LYLQMN | WLNGKEYKCKVSNKA | | AVYYCAR | | KSYPVTF | YYCQQYY | GEC (SEQ |
| | SLRAED | LPAPIEKTISKAKGQ | | DRPYYYK | | GQGTKVE | TTPPTFG | ID NO: |
| | TAVYYC | PREPQVYTLPPSREE | | MDVWGKG | | IK (SEQ | QGTRLEI | 45) |
| | ARGRGG | MTKNQVSLTCLVKGF | | TTVTVSS | | ID NO: | K (SEQ | |
| | SGWLDY | YPSDIAVEWESNGQP | | (SEQ ID | | 592) | ID NO: | |
| | WGQGTL | ENNYKTTPPVLDSDG | | NO: | | | 1359) | |
| | VTVSS | SFFLYSKLTVDKSRW | | 1474) | | | | |
| | (SEQ | QQGNVFSCSVMHEAL | | | | | | |
| | ID NO: | HNHYTQKSLSLSPG | | | | | | |
| | 1438) | (SEQ ID NO: 44) | | | | | | |
| PMAB52 | EVQLLE | ASTKGPSVFPLAPSS | GGGGSG | EVQLLES | GGGGSG | DIQMTQS | DIVMTQS | RTVAAPSV |
| | SGGGLV | KSTSGGTAALGCLVK | GGGSGG | GGGLVQP | GGGSGG | PSSLSAS | PDSLAVS | FIFPPSDE |
| | QPGGSL | DYFPEPVTVSWNSGA | GGS | GGSLRLS | GGSGGG | VGDRVTI | LGERATI | QLKSGTAS |
| | RLSCAA | LTSGVHTFPAVLQSS | (SEQ | CAASGFT | GS | TCRASQS | NCKSSQS | VVCLLNNF |
| | SGFTFS | GLYSLSSVVTVPSSS | ID NO: | FSDFWMH | (SEQ | VSRSLAW | VLYSPNN | YPREAKVQ |
| | NSDMSW | LGTQTYICNVNHKPS | 30) | WVRQAPG | ID NO: | YQQKPGK | KNYLAWY | WKVDNALQ |
| | VRQAPG | NTKVDKKVEPKSCDK | | KGLEWIS | 22) | APKLLIY | QQKPGQP | SGNSQESV |
| | KGLEWV | THTCPPCPAPEAAGA | | YISGDSG | | AASSLQS | PKLLIYW | TEQDSKDS |
| | SGITIS | PSVFLFPPKPKDTLM | | YTNYADS | | GVPSRFS | ASTRESG | TYSLSSTL |
| | GGSTYY | ISRTPEVTCVVVDVS | | VKGRFTI | | GSGSGTD | VPDRFSG | TLSKADYE |
| | ADSVKG | HEDPEVKFNWYVDGV | | SRDNSKN | | FTLTISS | SGSGTDF | KHKVYACE |
| | RFTISR | EVHNAKTKPREEQYN | | TLYLQMN | | LQPEDFA | TLTISSL | VTHQGLSS |
| | DNSKNT | STYRVVSVLTVLHQD | | SLRAEDT | | TYYCQQY | QAEDVAV | PVTKSFNR |
| | LYLQMN | WLNGKEYKCKVSNKA | | AVYYCAR | | KSYPVTF | YYCQQYY | GEC (SEQ |
| | SLRAED | LPAPIEKTISKAKGQ | | DRPYYYS | | GQGTKVE | TTPPTFG | ID NO: |
| | TAVYYC | PREPQVYTLPPSREE | | MDVWGKG | | IK (SEQ | QGTRLEI | 45) |
| | ARGRGG | MTKNQVSLTCLVKGF | | TTVTVSS | | ID NO: | K (SEQ | |
| | SGWLDY | YPSDIAVEWESNGQP | | (SEQ ID | | 592) | ID NO: | |
| | WGQGTL | ENNYKTTPPVLDSDG | | NO: | | | 1359) | |
| | VTVSS | SFFLYSKLTVDKSRW | | 1475) | | | | |
| | (SEQ | QQGNVFSCSVMHEAL | | | | | | |
| | ID NO: | HNHYTQKSLSLSPG | | | | | | |
| | 1438) | (SEQ ID NO: 44) | | | | | | |
| PMAB53 | EVQLLE | ASTKGPSVFPLAPSS | GGGGSG | EVQLLES | GGGGSG | DIQMTQS | DIVMTQS | RTVAAPSV |
| | SGGGLV | KSTSGGTAALGCLVK | GGGSGG | GGGLVQP | GGGSGG | PSSLSAS | PDSLAVS | FIFPPSDE |
| | QPGGSL | DYFPEPVTVSWNSGA | GGS | GGSLRLS | GGSGGG | VGDRVTI | LGERATI | QLKSGTAS |
| | RLSCAA | LTSGVHTFPAVLQSS | (SEQ | CAASGFT | GS | TCRASQS | NCKSSQS | VVCLLNNF |
| | SGFTFS | GLYSLSSVVTVPSSS | ID NO: | FSSYWMH | (SEQ | ISSSLAW | VLYSPNN | YPREAKVQ |
| | SYDMSW | LGTQTYICNVNHKPS | 30) | WVRQAPG | ID NO: | YQQKPGK | KNYLAWY | WKVDNALQ |
| | VRQAPG | NTKVDKKVEPKSCDK | | KGLEWVS | 22) | APKLLIY | QQKPGQP | SGNSQESV |
| | KGLEWV | THTCPPCPAPEAAGA | | YISGSGG | | AASSLQS | PKLLIYW | TEQDSKDS |
| | SGITIS | PSVFLFPPKPKDTLM | | YTNYADS | | GVPSRFS | ASTRESG | TYSLSSTL |
| | GGSTYY | ISRTPEVTCVVVDVS | | VKGRFTI | | GSGSGTD | VPDRFSG | TLSKADYE |
| | ADSVKG | HEDPEVKFNWYVDGV | | SRDNSKN | | FTLTISS | SGSGTDF | KHKVYACE |
| | RFTISR | EVHNAKTKPREEQYN | | TLYLQMN | | LQPEDFA | TLTISSL | VTHQGLSS |
| | DNSKNT | STYRVVSVLTVLHQD | | SLRAEDT | | TYYCQQY | QAEDVAV | PVTKSFNR |
| | LYLQMN | WLNGKEYKCKVSNKA | | AVYYCAR | | KSYPVTF | YYCQQYY | GEC (SEQ |
| | SLRAED | LPAPIEKTISKAKGQ | | DRPYYYD | | GQGTKVE | TTPPTFG | ID NO: |
| | TAVYYC | PREPQVYTLPPSREE | | IDVWGKG | | IK (SEQ | QGTRLEI | 45) |
| | ARGRGG | MTKNQVSLTCLVKGF | | TTVTVSS | | ID NO: | K (SEQ | |
| | SGWLDY | YPSDIAVEWESNGQP | | (SEQ ID | | 1367) | ID NO: | |
| | WGQGTT | ENNYKTTPPVLDSDG | | NO: | | | 1359) | |
| | VTVSS | SFFLYSKLTVDKSRW | | 1477) | | | | |
| | (SEQ | QQGNVFSCSVMHEAL | | | | | | |
| | ID NO: | HNHYTQKSLSLSPG | | | | | | |
| | 1476) | (SEQ ID NO: 44) | | | | | | |
| PMAB54 | EVQLVQ | ASTKGPSVFPLAPSS | GGGGSG | EVQLLES | GGGGSG | DIQMTQS | DIQMTQS | RTVAAPSV |
| | SGAEVK | KSTSGGTAALGCLVK | GGGSGG | GGGLVQP | GGGSGG | PSSLSAS | PSSLSAS | FIFPPSDE |
| | KPGASV | DYFPEPVTVSWNSGA | GGS | GGSLRLS | GGSGGG | VGDRVTI | VGDRVTI | QLKSGTAS |
| | KVSCKA | LTSGVHTFPAVLQSS | (SEQ | CAASGFT | GS | TCRASQS | TCRASQS | VVCLLNNF |
| | SGYSFT | GLYSLSSVVTVPSSS | ID NO: | FSSYWMH | (SEQ | ISSSLAW | ISSYLAW | YPREAKVQ |
| | SYYMHW | LGTQTYICNVNHKPS | 30) | WVRQAPG | ID NO: | YQQKPGK | YQQKPGK | WKVDNALQ |
| | VRQAPG | NTKVDKKVEPKSCDK | | KGLEWVS | 22) | APKLLIY | APKLLIY | SGNSQESV |
| | QGLEWM | THTCPPCPAPEAAGA | | YISGSGG | | AASSLQS | AASSLQS | TEQDSKDS |
| | GIINPS | PSVFLFPPKPKDTLM | | YTNYADS | | GVPSRFS | GVPSRFS | TYSLSSTL |
| | GGSTSY | ISRTPEVTCVVVDVS | | VKGRFTI | | GSGSGTD | GSGSGTD | TLSKADYE |
| | AQKFQG | HEDPEVKFNWYVDGV | | SRDNSKN | | FTLTISS | FTLTISS | KHKVYACE |
| | RVTMTR | EVHNAKTKPREEQYN | | TLYLQMN | | LQPEDFA | LQPEDFA | VTHQGLSS |
| | DTSTST | STYRVVSVLTVLHQD | | SLRAEDT | | TYYCQQY | TYYCQQS | PVTKSFNR |
| | VYMELS | WLNGKEYKCKVSNKA | | AVYYCAR | | KSYPVTF | YSTPPTF | GEC (SEQ |
| | SLRSED | LPAPIEKTISKAKGQ | | DRPYYYD | | GQGTKVE | GPGTKVD | ID NO: |
| | TAVYYC | PREPQVYTLPPSREE | | IDVWGKG | | IK (SEQ | IK (SEQ | 45) |
| | ASGWVY | MTKNQVSLTCLVKGF | | TTVTVSS | | ID NO: | ID NO: | |
| | WGQGTL | YPSDIAVEWESNGQP | | (SEQ ID | | 1367) | 1479) | |
| | VTVSS | ENNYKTTPPVLDSDG | | NO: | | | | |
| | (SEQ | SFFLYSKLTVDKSRW | | 1477) | | | | |
| | ID NO: | QQGNVFSCSVMHEAL | | | | | | |
| | 1478) | HNHYTQKSLSLSPG | | | | | | |
| | | (SEQ ID NO: 44) | | | | | | |
| PMAB55 | EVQLVQ | ASTKGPSVFPLAPSS | GGGGSG | EVQLLES | GGGGSG | DIQMTQS | DIQMTQS | RTVAAPSV |
| | SGAEVK | KSTSGGTAALGCLVK | GGGSGG | GGGLVQP | GGGSGG | PSSLSAS | PSSLSAS | FIFPPSDE |
| | KPGASV | DYFPEPVTVSWNSGA | GGS | GGSLRLS | GGSGGG | VGDRVTI | VGDRVTI | QLKSGTAS |
| | KVSCKA | LTSGVHTFPAVLQSS | (SEQ | CAASGFT | GS | TCRASQS | TCRASQS | VVCLLNNF |
| | SGYSFT | GLYSLSSVVTVPSSS | ID NO: | FSSYWMH | (SEQ | ISSSLAW | ISSYLAW | YPREAKVQ |
| | SYYMHW | LGTQTYICNVNHKPS | 30) | WVRQAPG | ID NO: | YQQKPGK | YQQKPGK | WKVDNALQ |
| | VRQAPG | NTKVDKKVEPKSCDK | | KGLEWVS | 22) | APKLLIY | APKLLIY | SGNSQESV |
| | QGLEWM | THTCPPCPAPEAAGA | | YISGSGG | | AASSLQS | AASSLQS | TEQDSKDS |
| | GIINPS | PSVFLFPPKPKDTLM | | YTNYADS | | GVPSRFS | GVPSRFS | TYSLSSTL |
| | GGSTSY | ISRTPEVTCVVVDVS | | VKGRFTI | | GSGSGTD | GSGSGTD | TLSKADYE |
| | AQKFQG | HEDPEVKFNWYVDGV | | SRDNSKN | | FTLTISS | FTLTISS | KHKVYACE |
| | RVTMTR | EVHNAKTKPREEQYN | | TLYLQMN | | LQPEDFA | LQPEDFA | VTHQGLSS |
| | DTSTST | STYRVVSVLTVLHQD | | SLRAEDT | | TYYCQQY | TYYCQQS | PVTKSFNR |
| | VYMELS | WLNGKEYKCKVSNKA | | AVYYCAR | | KSYPVTF | YSTPPTF | GEC (SEQ |
| | SLRSED | LPAPIEKTISKAKGQ | | DRPYYYD | | GQGTKVE | GPGTKVD | ID NO: |
| | TAVYYC | PREPQVYTLPPSREE | | LDVWGKG | | IK (SEQ | IK (SEQ | 45) |
| | ASGWVY | MTKNQVSLTCLVKGF | | TTVTVSS | | ID NO: | ID NO: | |
| | WGQGTL | YPSDIAVEWESNGQP | | (SEQ ID | | 1367) | 1479) | |
| | VTVSS | ENNYKTTPPVLDSDG | | NO: | | | | |
| | (SEQ | SFFLYSKLTVDKSRW | | 1480) | | | | |
| | ID NO: | QQGNVFSCSVMHEAL | | | | | | |
| | 1478) | HNHYTQKSLSLSPG | | | | | | |
| | | (SEQ ID NO: 44) | | | | | | |
| PMAB56 | EVQLLE | ASTKGPSVFPLAPSS | GGGGSG | EVQLLES | GGGGSG | DIQMTQS | DIVMTQS | RTVAAPSV |
| | SGGGLV | KSTSGGTAALGCLVK | GGGSGG | GGGLVQP | GGGSGG | PSSLSAS | PDSLAVS | FIFPPSDE |
| | QPGGSL | DYFPEPVTVSWNSGA | GGS | GGSLRLS | GGSGGG | VGDRVTI | LGERATI | QLKSGTAS |
| | RLSCAA | LTSGVHTFPAVLQSS | (SEQ | CAASGFT | GS | TCRASQS | NCKSSQS | VVCLLNNF |
| | SGFTFS | GLYSLSSVVTVPSSS | ID NO: | FSSYWMH | (SEQ | ISSSLAW | VLYSPNN | YPREAKVQ |
| | SYDMSW | LGTQTYICNVNHKPS | 30) | WVRQAPG | ID NO: | YQQKPGK | KNYLAWY | WKVDNALQ |
| | VRQAPG | NTKVDKKVEPKSCDK | | KGLEWVS | 22) | APKLLIY | QQKPGQP | SGNSQESV |
| | KGLEWV | THTCPPCPAPEAAGA | | YISGSGG | | AASSLQS | PKLLIYW | TEQDSKDS |
| | SGITIS | PSVFLFPPKPKDTLM | | YTNYADS | | GVPSRFS | ASTRESG | TYSLSSTL |
| | GGSTYY | ISRTPEVTCVVVDVS | | VKGRFTI | | GSGSGTD | VPDRFSG | TLSKADYE |
| | ADSVKG | HEDPEVKFNWYVDGV | | SRDNSKN | | FTLTISS | SGSGTDF | KHKVYACE |
| | RFTISR | EVHNAKTKPREEQYN | | TLYLQMN | | LQPEDFA | TLTISSL | VTHQGLSS |
| | DNSKNT | STYRVVSVLTVLHQD | | SLRAEDT | | TYYCQQY | QAEDVAV | PVTKSFNR |
| | LYLQMN | WLNGKEYKCKVSNKA | | AVYYCAR | | KSYPVTF | YYCQQYY | GEC (SEQ |
| | SLRAED | LPAPIEKTISKAKGQ | | DRPYYYD | | GQGTKVE | TTPPTFG | ID NO: |
| | TAVYYC | PREPQVYTLPPSREE | | LDVWGKG | | IK (SEQ | QGTRLEI | 45) |
| | ARGRGG | MTKNQVSLTCLVKGF | | TTVTVSS | | ID NO: | K (SEQ | |
| | SGWLDY | YPSDIAVEWESNGQP | | (SEQ ID | | 1367) | ID NO: | |
| | WGQGTT | ENNYKTTPPVLDSDG | | NO: | | | 1359) | |
| | VTVSS | SFFLYSKLTVDKSRW | | 1480) | | | | |
| | (SEQ | QQGNVFSCSVMHEAL | | | | | | |
| | ID NO: | HNHYTQKSLSLSPG | | | | | | |
| | 1476) | (SEQ ID NO: 44) | | | | | | |
| PMAB57 | QVQLVQ | ASTKGPSVFPLAPSS | GGGGSG | EVQLLES | GGGGSG | DIQMTQS | DIQMTQS | RTVAAPSV |
| | SGAEVK | KSTSGGTAALGCLVK | GGGSGG | GGGLVQP | GGGSGG | PSSLSAS | PSSLSAS | FIFPPSDE |
| | KPGASV | DYFPEPVTVSWNSGA | GGS | GGSLRLS | GGSGGG | VGDRVTI | VGDRVTI | QLKSGTAS |
| | KVSCKA | LTSGVHTFPAVLQSS | (SEQ | CAASGFT | GS | TCRASQS | TCQASRD | VVCLLNNF |
| | SGYSFT | GLYSLSSVVTVPSSS | ID NO: | FSDFWMH | (SEQ | VSRSLAW | IKNYLAW | YPREAKVQ |
| | TYYMHW | LGTQTYICNVNHKPS | 30) | WVRQAPG | ID NO: | YQQKPGK | YQQKPGK | WKVDNALQ |
| | VRQAPG | NTKVDKKVEPKSCDK | | KGLEWIS | 22) | APKLLIY | APKLLIY | SGNSQESV |
| | QGLEWM | THTCPPCPAPEAAGA | | YISGDSG | | AASSLQS | AASSLQS | TEQDSKDS |
| | GIIAPS | PSVFLFPPKPKDTLM | | YTNYADS | | GVPSRFS | GVPSRFS | TYSLSSTL |
| | GGSTSY | ISRTPEVTCVVVDVS | | VKGRFTI | | GSGSGTD | GSGSGTD | TLSKADYE |
| | AQKFQG | HEDPEVKFNWYVDGV | | SRDNSKN | | FTLTISS | FTLTISS | KHKVYACE |
| | RVTMTR | EVHNAKTKPREEQYN | | TLYLQMN | | LQPEDFA | LQPEDFA | VTHQGLSS |
| | DTSTST | STYRVVSVLTVLHQD | | SLRAEDT | | TYYCQQY | TYYCQQS | PVTKSFNR |
| | VYMELS | WLNGKEYKCKVSNKA | | AVYYCAR | | KSYPVTF | YSTPPTF | GEC (SEQ |
| | SLRSED | LPAPIEKTISKAKGQ | | DRPYYYY | | GQGTKVE | GPGTKVD | ID NO: |
| | TAVYYC | PREPQVYTLPPSREE | | MDVWGKG | | IK (SEQ | IK (SEQ | 45) |
| | ASGWVY | MTKNQVSLTCLVKGF | | TTVTVSS | | ID NO: | ID NO: | |
| | WGQGTL | YPSDIAVEWESNGQP | | (SEQ ID | | 592) | 1449) | |
| | VTVSS | ENNYKTTPPVLDSDG | | NO: | | | | |
| | (SEQ | SFFLYSKLTVDKSRW | | 591) | | | | |
| | ID NO: | QQGNVFSCSVMHEAL | | | | | | |
| | 1448) | HNHYTQKSLSLSPG | | | | | | |
| | | (SEQ ID NO: 44) | | | | | | |
| PMAB60 | EVQLLE | ASTKGPSVFPLAPSS | GGGGSG | EVQLLES | GGGGSG | DIQMTQS | DIVMTQS | RTVAAPSV |
| | SGGGLV | KSTSGGTAALGCLVK | GGGSGG | GGGLVQP | GGGSGG | PSSLSAS | PDSLAVS | FIFPPSDE |
| | QPGGSL | DYFPEPVTVSWNSGA | GGS | GGSLRLS | GGSGGG | VGDRVTI | LGERATI | QLKSGTAS |
| | RLSCAA | LTSGVHTFPAVLQSS | (SEQ | CAASGFT | GS | TCRASQS | NCKSSQS | VVCLLNNF |
| | SGFTFS | GLYSLSSVVTVPSSS | ID NO: | FSSYWMH | (SEQ | ISSSLAW | VLYSPNN | YPREAKVQ |
| | SYDMSW | LGTQTYICNVNHKPS | 30) | WVRQAPG | ID NO: | YQQKPGK | KNYLAWY | WKVDNALQ |
| | VRQAPG | NTKVDKKVEPKSCDK | | KCLEWVS | 22) | APKLLIY | QQKPGQP | SGNSQESV |
| | KGLEWV | THTCPPCPAPEAAGA | | YISGSGG | | AASSLQS | PKLLIYW | TEQDSKDS |
| | SGITIS | PSVFLFPPKPKDTLM | | YTNYADS | | GVPSRFS | ASTRESG | TYSLSSTL |
| | GGSTYY | ISRTPEVTCVVVDVS | | VKGRFTI | | GSGSGTD | VPDRFSG | TLSKADYE |
| | ADSVKG | HEDPEVKFNWYVDGV | | SRDNSKN | | FTLTISS | SGSGTDF | KHKVYACE |
| | RFTISR | EVHNAKTKPREEQYN | | TLYLQMN | | LQPEDFA | TLTISSL | VTHQGLSS |
| | DNSKNT | STYRVVSVLTVLHQD | | SLRAEDT | | TYYCQQY | QAEDVAV | PVTKSFNR |
| | LYLQMN | WLNGKEYKCKVSNKA | | AVYYCAR | | KSYPVTF | YYCQQYY | GEC (SEQ |
| | SLRAED | LPAPIEKTISKAKGQ | | DRPYYYD | | GCGTKVE | TTPPTFG | ID NO: |
| | TAVYYC | PREPQVYTLPPSREE | | MDVWGKG | | IK (SEQ | QGTRLEI | 45) |
| | ARGRGG | MTKNQVSLTCLVKGF | | TTVTVSS | | ID NO: | K (SEQ | |
| | SGWLDY | YPSDIAVEWESNGQP | | (SEQ ID | | 1543) | ID NO: | |
| | WGQGTT | ENNYKTTPPVLDSDG | | NO: | | | 1359) | |
| | VTVSS | SFFLYSKLTVDKSRW | | 1542) | | | | |
| | (SEQ | QQGNVFSCSVMHEAL | | | | | | |
| | ID NO: | HNHYTQKSLSLSPG | | | | | | |
| | 1476) | (SEQ ID NO: 44) | | | | | | |
| PMAB61 | EVQLVQ | ASTKGPSVFPLAPSS | GGGGSG | EVQLLES | GGGGSG | DIQMTQS | DIQMTQS | RTVAAPSV |
| | SGAEVK | KSTSGGTAALGCLVK | GGGSGG | GGGLVQP | GGGSGG | PSSLSAS | PSSLSAS | FIFPPSDE |
| | KPGASV | DYFPEPVTVSWNSGA | GGS | GGSLRLS | GGSGGG | VGDRVTI | VGDRVTI | QLKSGTAS |
| | KVSCKA | LTSGVHTFPAVLQSS | (SEQ | CAASGFT | GS | TCRASQS | TCRASQS | VVCLLNNF |
| | SGYSFT | GLYSLSSVVTVPSSS | ID NO: | FSSYWMH | (SEQ | ISSSLAW | ISSYLAW | YPREAKVQ |
| | SYYMHW | LGTQTYICNVNHKPS | 30) | WVRQAPG | ID NO: | YQQKPGK | YQQKPGK | WKVDNALQ |
| | VRQAPG | NTKVDKKVEPKSCDK | | KCLEWVS | 22) | APKLLIY | APKLLIY | SGNSQESV |
| | QGLEWM | THTCPPCPAPEAAGA | | YISGSGG | | AASSLQS | AASSLQS | TEQDSKDS |
| | GIINPS | PSVFLFPPKPKDTLM | | YTNYADS | | GVPSRFS | GVPSRFS | TYSLSSTL |
| | GGSTSY | ISRTPEVTCVVVDVS | | VKGRFTI | | GSGSGTD | GSGSGTD | TLSKADYE |
| | AQKFQG | HEDPEVKENWYVDGV | | SRDNSKN | | FTLTISS | FTLTISS | KHKVYACE |
| | RVTMTR | EVHNAKTKPREEQYN | | TLYLQMN | | LQPEDFA | LQPEDFA | VTHQGLSS |
| | DTSTST | STYRVVSVLTVLHQD | | SLRAEDT | | TYYCQQY | TYYCQQS | PVTKSFNR |
| | VYMELS | WLNGKEYKCKVSNKA | | AVYYCAR | | KSYPVTF | YSTPPTF | GEC (SEQ |
| | SLRSED | LPAPIEKTISKAKGQ | | DRPYYYD | | GCGTKVE | GPGTKVD | ID NO: |
| | TAVYYC | PREPQVYTLPPSREE | | MDVWGKG | | IK (SEQ | IK (SEQ | 45) |
| | ASGWVY | MTKNQVSLTCLVKGF | | TTVTVSS | | ID NO: | ID NO: | |
| | WGQGTL | YPSDIAVEWESNGQP | | (SEQ ID | | 1543) | 1479) | |
| | VTVSS | ENNYKTTPPVLDSDG | | NO: | | | | |
| | (SEQ | SFFLYSKLTVDKSRW | | 1542) | | | | |
| | ID NO: | QQGNVFSCSVMHEAL | | | | | | |
| | 1478) | HNHYTQKSLSLSPG | | | | | | |
| | | (SEQ ID NO: 44) | | | | | | |
| PMAB62 | EVQLLE | ASTKGPSVFPLAPSS | GGGGSG | EVQLLES | GGGGSG | DIQMTQS | DIVMTQS | RTVAAPSV |
| | SGGGLV | KSTSGGTAALGCLVK | GGGSGG | GGGLVQP | GGGSGG | PSSLSAS | PDSLAVS | FIFPPSDE |
| | QPGGSL | DYFPEPVTVSWNSGA | GGS | GGSLRLS | GGSGGG | VGDRVTI | LGERATI | QLKSGTAS |
| | RLSCAA | LTSGVHTFPAVLQSS | (SEQ | CAASGFT | GS | TCRASQS | NCKSSQS | VVCLLNNF |
| | SGFTFS | GLYSLSSVVTVPSSS | ID NO: | FSSYWMH | (SEQ | ISSSLAW | VLYSPNN | YPREAKVQ |
| | SYDMSW | LGTQTYICNVNHKPS | 30) | WVRQAPG | ID NO: | YQQKPGK | KNYLAWY | WKVDNALQ |
| | VRQAPG | NTKVDKKVEPKSCDK | | KCLEWVS | 22) | APKLLIY | QQKPGQP | SGNSQESV |
| | KGLEWV | THTCPPCPAPEAAGA | | YISGSGG | | AASSLQS | PKLLIYW | TEQDSKDS |
| | SGITIS | PSVFLFPPKPKDTLM | | YTNYADS | | GVPSRFS | ASTRESG | TYSLSSTL |
| | GGSTYY | ISRTPEVTCVVVDVS | | VKGRFTI | | GSGSGTD | VPDRFSG | TLSKADYE |
| | ADSVKG | HEDPEVKFNWYVDGV | | SRDNSKN | | FTLTISS | SGSGTDF | KHKVYACE |
| | RFTISR | EVHNAKTKPREEQYN | | TLYLQMN | | LQPEDFA | TLTISSL | VTHQGLSS |
| | DNSKNT | STYRVVSVLTVLHQD | | SLRAEDT | | TYYCQQY | QAEDVAV | PVTKSFNR |
| | LYLQMN | WLNGKEYKCKVSNKA | | AVYYCAR | | KSYPVTF | YYCQQYY | GEC (SEQ |
| | SLRAED | LPAPIEKTISKAKGQ | | DRPYYYD | | GCGTKVE | TTPPTFG | ID NO: |
| | TAVYYC | PREPQVYTLPPSREE | | IDVWGKG | | IK (SEQ | QGTRLEI | 45) |
| | ARGRGG | MTKNQVSLTCLVKGF | | TTVTVSS | | ID NO: | K (SEQ | |
| | SGWLDY | YPSDIAVEWESNGQP | | (SEQ ID | | 1543) | ID NO: | |
| | WGQGTT | ENNYKTTPPVLDSDG | | NO: | | | 1359) | |
| | VTVSS | SFFLYSKLTVDKSRW | | 1544) | | | | |
| | (SEQ | QQGNVFSCSVMHEAL | | | | | | |
| | ID NO: | HNHYTQKSLSLSPG | | | | | | |
| | 1476) | (SEQ ID NO: 44) | | | | | | |
| PMAB63 | EVQLVQ | ASTKGPSVFPLAPSS | GGGGSG | EVQLLES | GGGGSG | DIQMTQS | DIQMTQS | RTVAAPSV |
| | SGAEVK | KSTSGGTAALGCLVK | GGGSGG | GGGLVQP | GGGSGG | PSSLSAS | PSSLSAS | FIFPPSDE |
| | KPGASV | DYFPEPVTVSWNSGA | GGS | GGSLRLS | GGSGGG | VGDRVTI | VGDRVTI | QLKSGTAS |
| | KVSCKA | LTSGVHTFPAVLQSS | (SEQ | CAASGFT | GS | TCRASQS | TCRASQS | VVCLLNNF |
| | SGYSFT | GLYSLSSVVTVPSSS | ID NO: | FSSYWMH | (SEQ | ISSSLAW | ISSYLAW | YPREAKVQ |
| | SYYMHW | LGTQTYICNVNHKPS | 30) | WVRQAPG | ID NO: | YQQKPGK | YQQKPGK | WKVDNALQ |
| | VRQAPG | NTKVDKKVEPKSCDK | | KCLEWVS | 22) | APKLLIY | APKLLIY | SGNSQESV |
| | QGLEWM | THTCPPCPAPEAAGA | | YISGSGG | | AASSLQS | AASSLQS | TEQDSKDS |
| | GIINPS | PSVFLFPPKPKDTLM | | YTNYADS | | GVPSRFS | GVPSRFS | TYSLSSTL |
| | GGSTSY | ISRTPEVTCVVVDVS | | VKGRFTI | | GSGSGTD | GSGSGTD | TLSKADYE |
| | AQKFQG | HEDPEVKFNWYVDGV | | SRDNSKN | | FTLTISS | FTLTISS | KHKVYACE |
| | RVTMTR | EVHNAKTKPREEQYN | | TLYLQMN | | LQPEDFA | LQPEDFA | VTHQGLSS |
| | DTSTST | STYRVVSVLTVLHQD | | SLRAEDT | | TYYCQQY | TYYCQQS | PVTKSFNR |
| | VYMELS | WLNGKEYKCKVSNKA | | AVYYCAR | | KSYPVTF | YSTPPTF | GEC (SEQ |
| | SLRSED | LPAPIEKTISKAKGQ | | DRPYYYD | | GCGTKVE | GPGTKVD | ID NO: |
| | TAVYYC | PREPQVYTLPPSREE | | IDVWGKG | | IK (SEQ | IK (SEQ | 45) |
| | ASGWVY | MTKNQVSLTCLVKGF | | TTVTVSS | | ID NO: | ID NO: | |
| | WGQGTL | YPSDIAVEWESNGQP | | (SEQ ID | | 1543) | 1479) | |
| | VTVSS | ENNYKTTPPVLDSDG | | NO: | | | | |
| | (SEQ | SFFLYSKLTVDKSRW | | 1544) | | | | |
| | ID NO: | QQGNVFSCSVMHEAL | | | | | | |
| | 1478) | HNHYTQKSLSLSPG | | | | | | |
| | | (SEQ ID NO: 44) | | | | | | |
| PMAB64 | EVQLVQ | ASTKGPSVFPLAPSS | GGGGSG | EVQLLES | GGGGSG | DIQMTQS | DIQMTQS | RTVAAPSV |
| | SGAEVK | KSTSGGTAALGCLVK | GGGSGG | GGGLVQP | GGGSGG | PSSLSAS | PSSLSAS | FIFPPSDE |
| | KPGASV | DYFPEPVTVSWNSGA | GGS | GGSLRLS | GGSGGG | VGDRVTI | VGDRVTI | QLKSGTAS |
| | KVSCKA | LTSGVHTFPAVLQSS | (SEQ | CAASGFT | GS | TCRASQS | TCRASQS | VVCLLNNF |
| | SGYSFT | GLYSLSSVVTVPSSS | ID NO: | FSSYWMH | (SEQ | ISSSLAW | ISSYLAW | YPREAKVQ |
| | SYYMHW | LGTQTYICNVNHKPS | 30) | WVRQAPG | ID NO: | YQQKPGK | YQQKPGK | WKVDNALQ |
| | VRQAPG | NTKVDKKVEPKSCDK | | KCLEWVS | 22) | APKLLIY | APKLLIY | SGNSQESV |
| | QGLEWM | THTCPPCPAPEAAGA | | YISGSGG | | AASSLQS | AASSLQS | TEQDSKDS |
| | GIINPS | PSVFLFPPKPKDTLM | | YTNYADS | | GVPSRFS | GVPSRFS | TYSLSSTL |
| | GGSTSY | ISRTPEVTCVVVDVS | | VKGRFTI | | GSGSGTD | GSGSGTD | TLSKADYE |
| | AQKFQG | HEDPEVKFNWYVDGV | | SRDNSKN | | FTLTISS | FTLTISS | KHKVYACE |
| | RVTMTR | EVHNAKTKPREEQYN | | TLYLQMN | | LQPEDFA | LQPEDFA | VTHQGLSS |
| | DTSTST | STYRVVSVLTVLHQD | | SLRAEDT | | TYYCQQY | TYYCQQS | PVTKSFNR |
| | VYMELS | WLNGKEYKCKVSNKA | | AVYYCAR | | KSYPVTF | YSTPPTF | GEC (SEQ |
| | SLRSED | LPAPIEKTISKAKGQ | | DRPYYYD | | GCGTKVE | GPGTKVD | ID NO: |
| | TAVYYC | PREPQVYTLPPSREE | | LDVWGKG | | IK (SEQ | IK (SEQ | 45) |
| | ASGWVY | MTKNQVSLTCLVKGF | | TTVTVSS | | ID NO: | ID NO: | |
| | WGQGTL | YPSDIAVEWESNGQP | | (SEQ ID | | 1543) | 1479) | |
| | VTVSS | ENNYKTTPPVLDSDG | | NO: | | | | |
| | (SEQ | SFFLYSKLTVDKSRW | | 1545) | | | | |
| | ID NO: | QQGNVFSCSVMHEAL | | | | | | |
| | 1478) | HNHYTQKSLSLSPG | | | | | | |
| | | (SEQ ID NO: 44) | | | | | | |
| PMAB65 | EVQLLE | ASTKGPSVFPLAPSS | GGGGSG | EVQLLES | GGGGSG | DIQMTQS | DIVMTQS | RTVAAPSV |
| | SGGGLV | KSTSGGTAALGCLVK | GGGSGG | GGGLVQP | GGGSGG | PSSLSAS | PDSLAVS | FIFPPSDE |
| | QPGGSL | DYFPEPVTVSWNSGA | GGS | GGSLRLS | GGSGGG | VGDRVTI | LGERATI | QLKSGTAS |
| | RLSCAA | LTSGVHTFPAVLQSS | (SEQ | CAASGFT | GS | TCRASQS | NCKSSQS | VVCLLNNF |
| | SGFTFS | GLYSLSSVVTVPSSS | ID NO: | FSSYWMH | (SEQ | ISSSLAW | VLYSPNN | YPREAKVQ |
| | SYDMSW | LGTQTYICNVNHKPS | 30) | WVRQAPG | ID NO: | YQQKPGK | KNYLAWY | WKVDNALQ |
| | VRQAPG | NTKVDKKVEPKSCDK | | KCLEWVS | 22) | APKLLIY | QQKPGQP | SGNSQESV |
| | KGLEWV | THTCPPCPAPEAAGA | | YISGSGG | | AASSLQS | PKLLIYW | TEQDSKDS |
| | SGITIS | PSVFLFPPKPKDTLM | | YTNYADS | | GVPSRFS | ASTRESG | TYSLSSTL |
| | GGSTYY | ISRTPEVTCVVVDVS | | VKGRFTI | | GSGSGTD | VPDRFSG | TLSKADYE |
| | ADSVKG | HEDPEVKFNWYVDGV | | SRDNSKN | | FTLTISS | SGSGTDF | KHKVYACE |
| | RFTISR | EVHNAKTKPREEQYN | | TLYLQMN | | LQPEDFA | TLTISSL | VTHQGLSS |
| | DNSKNT | STYRVVSVLTVLHQD | | SLRAEDT | | TYYCQQY | QAEDVAV | PVTKSFNR |
| | LYLQMN | WLNGKEYKCKVSNKA | | AVYYCAR | | KSYPVTF | YYCQQYY | GEC (SEQ |
| | SLRAED | LPAPIEKTISKAKGQ | | DRPYYYD | | GCGTKVE | TTPPTFG | ID NO: |
| | TAVYYC | PREPQVYTLPPSREE | | LDVWGKG | | IK (SEQ | QGTRLEI | 45) |
| | ARGRGG | MTKNQVSLTCLVKGF | | TTVTVSS | | ID NO: | K (SEQ | |
| | SGWLDY | YPSDIAVEWESNGQP | | (SEQ ID | | 1543) | ID NO: | |
| | WGQGTT | ENNYKTTPPVLDSDG | | NO: | | | 1359) | |
| | VTVSS | SFFLYSKLTVDKSRW | | 1545) | | | | |
| | (SEQ | QQGNVFSCSVMHEAL | | | | | | |
| | ID NO: | HNHYTQKSLSLSPG | | | | | | |
| | 1476) | (SEQ ID NO: 44) | | | | | | |
| PMAB66 | EVQLLE | ASTKGPSVFPLAPSS | GGGSEG | EVQLLES | GGGGSG | DIQMTQS | DIVMTQS | RTVAAPSV |
| | SGGGLV | KSTSGGTAALGCLVK | GGSEGG | GGGLVQP | GGGSGG | PSSLSAS | PDSLAVS | FIFPPSDE |
| | QPGGSL | DYFPEPVTVSWNSGA | GSE | GGSLRLS | GGSGGG | VGDRVTI | LGERATI | QLKSGTAS |
| | RLSCAA | LTSGVHTFPAVLQSS | (SEQ | CAASGFT | GS | TCRASQS | NCKSSQS | VVCLLNNF |
| | SGFTFS | GLYSLSSVVTVPSSS | ID NO: | FSSYWMH | (SEQ | ISSSLAW | VLYSPNN | YPREAKVQ |
| | SYDMSW | LGTQTYICNVNHKPS | 1546) | WVRQAPG | ID NO: | YQQKPGK | KNYLAWY | WKVDNALQ |
| | VRQAPG | NTKVDKKVEPKSCDK | | KGLEWVS | 22) | APKLLIY | QQKPGQP | SGNSQESV |
| | KGLEWV | THTCPPCPAPEAAGA | | YISGSGG | | AASSLQS | PKLLIYW | TEQDSKDS |
| | SGITIS | PSVFLFPPKPKDTLM | | YTNYADS | | GVPSRFS | ASTRESG | TYSLSSTL |
| | GGSTYY | ISRTPEVTCVVVDVS | | VKGRFTI | | GSGSGTD | VPDRFSG | TLSKADYE |
| | ADSVKG | HEDPEVKFNWYVDGV | | SRDNSKN | | FTLTISS | SGSGTDF | KHKVYACE |
| | RFTISR | EVHNAKTKPREEQYN | | TLYLQMN | | LQPEDFA | TLTISSL | VTHQGLSS |
| | DNSKNT | STYRVVSVLTVLHQD | | SLRAEDT | | TYYCQQY | QAEDVAV | PVTKSFNR |
| | LYLQMN | WLNGKEYKCKVSNKA | | AVYYCAR | | KSYPVTF | YYCQQYY | GEC (SEQ |
| | SLRAED | LPAPIEKTISKAKGQ | | DRPYYYD | | GQGTKVE | TTPPTFG | ID NO: |
| | TAVYYC | PREPQVYTLPPSREE | | MDVWGKG | | IK (SEQ | QGTRLEI | 45) |
| | ARGRGG | MTKNQVSLTCLVKGF | | TTVTVSS | | ID NO: | K (SEQ | |
| | SGWLDY | YPSDIAVEWESNGQP | | (SEQ ID | | 1367) | ID NO: | |
| | WGQGTT | ENNYKTTPPVLDSDG | | NO: | | | 1359) | |
| | VTVSS | SFFLYSKLTVDKSRW | | 1445) | | | | |
| | (SEQ | QQGNVFSCSVMHEAL | | | | | | |
| | ID NO: | HNHYTQKSLSLSPG | | | | | | |
| | 1476) | (SEQ ID NO: 44) | | | | | | |
| PMAB67 | EVQLVQ | ASTKGPSVFPLAPSS | GGGSEG | EVQLLES | GGGGSG | DIQMTQS | DIQMTQS | RTVAAPSV |
| | SGAEVK | KSTSGGTAALGCLVK | GGSEGG | GGGLVQP | GGGSGG | PSSLSAS | PSSLSAS | FIFPPSDE |
| | KPGASV | DYFPEPVTVSWNSGA | GSE | GGSLRLS | GGSGGG | VGDRVTI | VGDRVTI | QLKSGTAS |
| | KVSCKA | LTSGVHTFPAVLQSS | (SEQ | CAASGFT | GS | TCRASQS | TCRASQS | VVCLLNNF |
| | SGYSFT | GLYSLSSVVTVPSSS | ID NO: | FSSYWMH | (SEQ | ISSSLAW | ISSYLAW | YPREAKVQ |
| | SYYMHW | LGTQTYICNVNHKPS | 1546) | WVRQAPG | ID NO: | YQQKPGK | YQQKPGK | WKVDNALQ |
| | VRQAPG | NTKVDKKVEPKSCDK | | KGLEWVS | 22) | APKLLIY | APKLLIY | SGNSQESV |
| | QGLEWM | THTCPPCPAPEAAGA | | YISGSGG | | AASSLQS | AASSLQS | TEQDSKDS |
| | GIINPS | PSVFLFPPKPKDTLM | | YTNYADS | | GVPSRFS | GVPSRFS | TYSLSSTL |
| | GGSTSY | ISRTPEVTCVVVDVS | | VKGRFTI | | GSGSGTD | GSGSGTD | TLSKADYE |
| | AQKFQG | HEDPEVKFNWYVDGV | | SRDNSKN | | FTLTISS | FTLTISS | KHKVYACE |
| | RVTMTR | EVHNAKTKPREEQYN | | TLYLQMN | | LQPEDFA | LQPEDFA | VTHQGLSS |
| | DTSTST | STYRVVSVLTVLHQD | | SLRAEDT | | TYYCQQY | TYYCQQS | PVTKSFNR |
| | VYMELS | WLNGKEYKCKVSNKA | | AVYYCAR | | KSYPVTF | YSTPPTF | GEC (SEQ |
| | SLRSED | LPAPIEKTISKAKGQ | | DRPYYYD | | GQGTKVE | GPGTKVD | ID NO: |
| | TAVYYC | PREPQVYTLPPSREE | | MDVWGKG | | IK (SEQ | IK (SEQ | 45) |
| | ASGWVY | MTKNQVSLTCLVKGF | | TTVTVSS | | ID NO: | ID NO: | |
| | WGQGTL | YPSDIAVEWESNGQP | | (SEQ ID | | 1367) | 1479) | |
| | VTVSS | ENNYKTTPPVLDSDG | | NO: | | | | |
| | (SEQ | SFFLYSKLTVDKSRW | | 1445) | | | | |
| | ID NO: | QQGNVFSCSVMHEAL | | | | | | |
| | 1478) | HNHYTQKSLSLSPG | | | | | | |
| | | (SEQ ID NO: 44) | | | | | | |
| PMAB68 | EVQLLE | ASTKGPSVFPLAPSS | GGGSEG | EVQLLES | GGGGSG | DIQMTQS | DIVMTQS | RTVAAPSV |
| | SGGGLV | KSTSGGTAALGCLVK | GGSEGG | GGGLVQP | GGGSGG | PSSLSAS | PDSLAVS | FIFPPSDE |
| | QPGGSL | DYFPEPVTVSWNSGA | GSE | GGSLRLS | GGSGGG | VGDRVTI | LGERATI | QLKSGTAS |
| | RLSCAA | LTSGVHTFPAVLQSS | (SEQ | CAASGFT | GS | TCRASQS | NCKSSQS | VVCLLNNF |
| | SGFTFS | GLYSLSSVVTVPSSS | ID NO: | FSSYWMH | (SEQ | ISSSLAW | VLYSPNN | YPREAKVQ |
| | SYDMSW | LGTQTYICNVNHKPS | 1546) | WVRQAPG | ID NO: | YQQKPGK | KNYLAWY | WKVDNALQ |
| | VRQAPG | NTKVDKKVEPKSCDK | | KGLEWVS | 22) | APKLLIY | QQKPGQP | SGNSQESV |
| | KGLEWV | THTCPPCPAPEAAGA | | YISGSGG | | AASSLQS | PKLLIYW | TEQDSKDS |
| | SGITIS | PSVFLFPPKPKDTLM | | YTNYADS | | GVPSRFS | ASTRESG | TYSLSSTL |
| | GGSTYY | ISRTPEVTCVVVDVS | | VKGRFTI | | GSGSGTD | VPDRFSG | TLSKADYE |
| | ADSVKG | HEDPEVKFNWYVDGV | | SRDNSKN | | FTLTISS | SGSGTDF | KHKVYACE |
| | RFTISR | EVHNAKTKPREEQYN | | TLYLQMN | | LQPEDFA | TLTISSL | VTHQGLSS |
| | DNSKNT | STYRVVSVLTVLHQD | | SLRAEDT | | TYYCQQY | QAEDVAV | PVTKSFNR |
| | LYLQMN | WLNGKEYKCKVSNKA | | AVYYCAR | | KSYPVTF | YYCQQYY | GEC (SEQ |
| | SLRAED | LPAPIEKTISKAKGQ | | DRPYYYD | | GQGTKVE | TTPPTFG | ID NO: |
| | TAVYYC | PREPQVYTLPPSREE | | IDVWGKG | | IK (SEQ | QGTRLEI | 45) |
| | ARGRGG | MTKNQVSLTCLVKGF | | TTVTVSS | | ID NO: | K (SEQ | |
| | SGWLDY | YPSDIAVEWESNGQP | | (SEQ ID | | 1367) | ID NO: | |
| | WGQGTT | ENNYKTTPPVLDSDG | | NO: | | | 1359) | |
| | VTVSS | SFFLYSKLTVDKSRW | | 1477) | | | | |
| | (SEQ | QQGNVFSCSVMHEAL | | | | | | |
| | ID NO: | HNHYTQKSLSLSPG | | | | | | |
| | 1476) | (SEQ ID NO: 44) | | | | | | |
| PMAB69 | EVQLVQ | ASTKGPSVFPLAPSS | GGGSEG | EVQLLES | GGGGSG | DIQMTQS | DIQMTQS | RTVAAPSV |
| | SGAEVK | KSTSGGTAALGCLVK | GGSEGG | GGGLVQP | GGGSGG | PSSLSAS | PSSLSAS | FIFPPSDE |
| | KPGASV | DYFPEPVTVSWNSGA | GSE | GGSLRLS | GGSGGG | VGDRVTI | VGDRVTI | QLKSGTAS |
| | KVSCKA | LTSGVHTFPAVLQSS | (SEQ | CAASGFT | GS | TCRASQS | TCRASQS | VVCLLNNF |
| | SGYSFT | GLYSLSSVVTVPSSS | ID NO: | FSSYWMH | (SEQ | ISSSLAW | ISSYLAW | YPREAKVQ |
| | SYYMHW | LGTQTYICNVNHKPS | 1546) | WVRQAPG | ID NO: | YQQKPGK | YQQKPGK | WKVDNALQ |
| | VRQAPG | NTKVDKKVEPKSCDK | | KGLEWVS | 22) | APKLLIY | APKLLIY | SGNSQESV |
| | QGLEWM | THTCPPCPAPEAAGA | | YISGSGG | | AASSLQS | AASSLQS | TEQDSKDS |
| | GIINPS | PSVFLFPPKPKDTLM | | YTNYADS | | GVPSRFS | GVPSRFS | TYSLSSTL |
| | GGSTSY | ISRTPEVTCVVVDVS | | VKGRFTI | | GSGSGTD | GSGSGTD | TLSKADYE |
| | AQKFQG | HEDPEVKFNWYVDGV | | SRDNSKN | | FTLTISS | FTLTISS | KHKVYACE |
| | RVTMTR | EVHNAKTKPREEQYN | | TLYLQMN | | LQPEDFA | LQPEDFA | VTHQGLSS |
| | DTSTST | STYRVVSVLTVLHQD | | SLRAEDT | | TYYCQQY | TYYCQQS | PVTKSFNR |
| | VYMELS | WLNGKEYKCKVSNKA | | AVYYCAR | | KSYPVTF | YSTPPTF | GEC (SEQ |
| | SLRSED | LPAPIEKTISKAKGQ | | DRPYYYD | | GQGTKVE | GPGTKVD | ID NO: |
| | TAVYYC | PREPQVYTLPPSREE | | IDVWGKG | | IK (SEQ | IK (SEQ | 45) |
| | ASGWVY | MTKNQVSLTCLVKGF | | TTVTVSS | | ID NO: | ID NO: | |
| | WGQGTL | YPSDIAVEWESNGQP | | (SEQ ID | | 1367) | 1479) | |
| | VTVSS | ENNYKTTPPVLDSDG | | NO: | | | | |
| | (SEQ | SFFLYSKLTVDKSRW | | 1477) | | | | |
| | ID NO: | QQGNVFSCSVMHEAL | | | | | | |
| | 1478) | HNHYTQKSLSLSPG | | | | | | |
| | | (SEQ ID NO: 44) | | | | | | |
| PMAB70 | EVQLVQ | ASTKGPSVFPLAPSS | GGGSEG | EVQLLES | GGGGSG | DIQMTQS | DIQMTQS | RTVAAPSV |
| | SGAEVK | KSTSGGTAALGCLVK | GGSEGG | GGGLVQP | GGGSGG | PSSLSAS | PSSLSAS | FIFPPSDE |
| | KPGASV | DYFPEPVTVSWNSGA | GSE | GGSLRLS | GGSGGG | VGDRVTI | VGDRVTI | QLKSGTAS |
| | KVSCKA | LTSGVHTFPAVLQSS | (SEQ | CAASGFT | GS | TCRASQS | TCRASQS | VVCLLNNF |
| | SGYSFT | GLYSLSSVVTVPSSS | ID NO: | FSSYWMH | (SEQ | ISSSLAW | ISSYLAW | YPREAKVQ |
| | SYYMHW | LGTQTYICNVNHKPS | 1546) | WVRQAPG | ID NO: | YQQKPGK | YQQKPGK | WKVDNALQ |
| | VRQAPG | NTKVDKKVEPKSCDK | | KGLEWVS | 22) | APKLLIY | APKLLIY | SGNSQESV |
| | QGLEWM | THTCPPCPAPEAAGA | | YISGSGG | | AASSLQS | AASSLQS | TEQDSKDS |
| | GIINPS | PSVFLFPPKPKDTLM | | YTNYADS | | GVPSRFS | GVPSRFS | TYSLSSTL |
| | GGSTSY | ISRTPEVTCVVVDVS | | VKGRFTI | | GSGSGTD | GSGSGTD | TLSKADYE |
| | AQKFQG | HEDPEVKFNWYVDGV | | SRDNSKN | | FTLTISS | FTLTISS | KHKVYACE |
| | RVTMTR | EVHNAKTKPREEQYN | | TLYLQMN | | LQPEDFA | LQPEDFA | VTHQGLSS |
| | DTSTST | STYRVVSVLTVLHQD | | SLRAEDT | | TYYCQQY | TYYCQQS | PVTKSFNR |
| | VYMELS | WLNGKEYKCKVSNKA | | AVYYCAR | | KSYPVTF | YSTPPTF | GEC (SEQ |
| | SLRSED | LPAPIEKTISKAKGQ | | DRPYYYD | | GQGTKVE | GPGTKVD | ID NO: |
| | TAVYYC | PREPQVYTLPPSREE | | LDVWGKG | | IK (SEQ | IK (SEQ | 45) |
| | ASGWVY | MTKNQVSLTCLVKGF | | TTVTVSS | | ID NO: | ID NO: | |
| | WGQGTL | YPSDIAVEWESNGQP | | (SEQ ID | | 1367) | 1479) | |
| | VTVSS | ENNYKTTPPVLDSDG | | NO: | | | | |
| | (SEQ | SFFLYSKLTVDKSRW | | 1480) | | | | |
| | ID NO: | QQGNVFSCSVMHEAL | | | | | | |
| | 1478) | HNHYTQKSLSLSPG | | | | | | |
| | | (SEQ ID NO: 44) | | | | | | |
| PMAB71 | EVQLLE | ASTKGPSVFPLAPSS | GGGSEG | EVQLLES | GGGGSG | DIQMTQS | DIVMTQS | RTVAAPSV |
| | SGGGLV | KSTSGGTAALGCLVK | GGSEGG | GGGLVQP | GGGSGG | PSSLSAS | PDSLAVS | FIFPPSDE |
| | QPGGSL | DYFPEPVTVSWNSGA | GSE | GGSLRLS | GGSGGG | VGDRVTI | LGERATI | QLKSGTAS |
| | RLSCAA | LTSGVHTFPAVLQSS | (SEQ | CAASGFT | GS | TCRASQS | NCKSSQS | VVCLLNNF |
| | SGFTFS | GLYSLSSVVTVPSSS | ID NO: | FSSYWMH | (SEQ | ISSSLAW | VLYSPNN | YPREAKVQ |
| | SYDMSW | LGTQTYICNVNHKPS | 1546) | WVRQAPG | ID NO: | YQQKPGK | KNYLAWY | WKVDNALQ |
| | VRQAPG | NTKVDKKVEPKSCDK | | KGLEWVS | 22) | APKLLIY | QQKPGQP | SGNSQESV |
| | KGLEWV | THTCPPCPAPEAAGA | | YISGSGG | | AASSLQS | PKLLIYW | TEQDSKDS |
| | SGITIS | PSVFLFPPKPKDTLM | | YTNYADS | | GVPSRFS | ASTRESG | TYSLSSTL |
| | GGSTYY | ISRTPEVTCVVVDVS | | VKGRFTI | | GSGSGTD | VPDRFSG | TLSKADYE |
| | ADSVKG | HEDPEVKFNWYVDGV | | SRDNSKN | | FTLTISS | SGSGTDF | KHKVYACE |
| | RFTISR | EVHNAKTKPREEQYN | | TLYLQMN | | LQPEDFA | TLTISSL | VTHQGLSS |
| | DNSKNT | STYRVVSVLTVLHQD | | SLRAEDT | | TYYCQQY | QAEDVAV | PVTKSFNR |
| | LYLQMN | WLNGKEYKCKVSNKA | | AVYYCAR | | KSYPVTF | YYCQQYY | GEC (SEQ |
| | SLRAED | LPAPIEKTISKAKGQ | | DRPYYYD | | GQGTKVE | TTPPTFG | ID NO: |
| | TAVYYC | PREPQVYTLPPSREE | | LDVWGKG | | IK (SEQ | QGTRLEI | 45) |
| | ARGRGG | MTKNQVSLTCLVKGF | | TTVTVSS | | ID NO: | K (SEQ | |
| | SGWLDY | YPSDIAVEWESNGQP | | (SEQ ID | | 1367) | ID NO: | |
| | WGQGTT | ENNYKTTPPVLDSDG | | NO: | | | 1359) | |
| | VTVSS | SFFLYSKLTVDKSRW | | 1480) | | | | |
| | (SEQ | QQGNVFSCSVMHEAL | | | | | | |
| | ID NO: | HNHYTQKSLSLSPG | | | | | | |
| | 1476) | (SEQ ID NO: 44) | | | | | | |
| PMAB72 | EVQLLE | ASTKGPSVFPLAPSS | GGGSEG | EVQLLES | GGGGSG | DIQMTQS | DIVMTQS | RTVAAPSV |
| | SGGGLV | KSTSGGTAALGCLVK | GGSEGG | GGGLVQP | GGGSGG | PSSLSAS | PDSLAVS | FIFPPSDE |
| | QPGGSL | DYFPEPVTVSWNSGA | GSE | GGSLRLS | GGSGGG | VGDRVTI | LGERATI | QLKSGTAS |
| | RLSCAA | LTSGVHTFPAVLQSS | (SEQ | CAASGFT | GS | TCRASQS | NCKSSQS | VVCLLNNF |
| | SGFTFS | GLYSLSSVVTVPSSS | ID NO: | FSSYWMH | (SEQ | ISSSLAW | VLYSPNN | YPREAKVQ |
| | SYDMSW | LGTQTYICNVNHKPS | 1546) | WVRQAPG | ID NO: | YQQKPGK | KNYLAWY | WKVDNALQ |
| | VRQAPG | NTKVDKKVEPKSCDK | | KCLEWVS | 22) | APKLLIY | QQKPGQP | SGNSQESV |
| | KGLEWV | THTCPPCPAPEAAGA | | YISGSGG | | AASSLQS | PKLLIYW | TEQDSKDS |
| | SGITIS | PSVFLFPPKPKDTLM | | YTNYADS | | GVPSRFS | ASTRESG | TYSLSSTL |
| | GGSTYY | ISRTPEVTCVVVDVS | | VKGRFTI | | GSGSGTD | VPDRFSG | TLSKADYE |
| | ADSVKG | HEDPEVKFNWYVDGV | | SRDNSKN | | FTLTISS | SGSGTDF | KHKVYACE |
| | RFTISR | EVHNAKTKPREEQYN | | TLYLQMN | | LQPEDFA | TLTISSL | VTHQGLSS |
| | DNSKNT | STYRVVSVLTVLHQD | | SLRAEDT | | TYYCQQY | QAEDVAV | PVTKSFNR |
| | LYLQMN | WLNGKEYKCKVSNKA | | AVYYCAR | | KSYPVTF | YYCQQYY | GEC (SEQ |
| | SLRAED | LPAPIEKTISKAKGQ | | DRPYYYD | | GCGTKVE | TTPPTFG | ID NO: |
| | TAVYYC | PREPQVYTLPPSREE | | MDVWGKG | | IK (SEQ | QGTRLEI | 45) |
| | ARGRGG | MTKNQVSLTCLVKGF | | TTVTVSS | | ID NO: | K (SEQ | |
| | SGWLDY | YPSDIAVEWESNGQP | | (SEQ ID | | 1543) | ID NO: | |
| | WGQGTT | ENNYKTTPPVLDSDG | | NO: | | | 1359) | |
| | VTVSS | SFFLYSKLTVDKSRW | | 1542) | | | | |
| | (SEQ | QQGNVFSCSVMHEAL | | | | | | |
| | ID NO: | HNHYTQKSLSLSPG | | | | | | |
| | 1476) | (SEQ ID NO: 44) | | | | | | |
| PMAB73 | EVQLVQ | ASTKGPSVFPLAPSS | GGGSEG | EVQLLES | GGGGSG | DIQMTQS | DIQMTQS | RTVAAPSV |
| | SGAEVK | KSTSGGTAALGCLVK | GGSEGG | GGGLVQP | GGGSGG | PSSLSAS | PSSLSAS | FIFPPSDE |
| | KPGASV | DYFPEPVTVSWNSGA | GSE | GGSLRLS | GGSGGG | VGDRVTI | VGDRVTI | QLKSGTAS |
| | KVSCKA | LTSGVHTFPAVLQSS | (SEQ | CAASGFT | GS | TCRASQS | TCRASQS | VVCLLNNF |
| | SGYSFT | GLYSLSSVVTVPSSS | ID NO: | FSSYWMH | (SEQ | ISSSLAW | ISSYLAW | YPREAKVQ |
| | SYYMHW | LGTQTYICNVNHKPS | 1546) | WVRQAPG | ID NO: | YQQKPGK | YQQKPGK | WKVDNALQ |
| | VRQAPG | NTKVDKKVEPKSCDK | | KCLEWVS | 22) | APKLLIY | APKLLIY | SGNSQESV |
| | QGLEWM | THTCPPCPAPEAAGA | | YISGSGG | | AASSLQS | AASSLQS | TEQDSKDS |
| | GIINPS | PSVFLFPPKPKDTLM | | YTNYADS | | GVPSRFS | GVPSRFS | TYSLSSTL |
| | GGSTSY | ISRTPEVTCVVVDVS | | VKGRFTI | | GSGSGTD | GSGSGTD | TLSKADYE |
| | AQKFQG | HEDPEVKFNWYVDGV | | SRDNSKN | | FTLTISS | FTLTISS | KHKVYACE |
| | RVTMTR | EVHNAKTKPREEQYN | | TLYLQMN | | LQPEDFA | LQPEDFA | VTHQGLSS |
| | DTSTST | STYRVVSVLTVLHQD | | SLRAEDT | | TYYCQQY | TYYCQQS | PVTKSFNR |
| | VYMELS | WLNGKEYKCKVSNKA | | AVYYCAR | | KSYPVTF | YSTPPTF | GEC (SEQ |
| | SLRSED | LPAPIEKTISKAKGQ | | DRPYYYD | | GCGTKVE | GPGTKVD | ID NO: |
| | TAVYYC | PREPQVYTLPPSREE | | MDVWGKG | | IK (SEQ | IK (SEQ | 45) |
| | ASGWVY | MTKNQVSLTCLVKGF | | TTVTVSS | | ID NO: | ID NO: | |
| | WGQGTL | YPSDIAVEWESNGQP | | (SEQ ID | | 1543) | 1479) | |
| | VTVSS | ENNYKTTPPVLDSDG | | NO: | | | | |
| | (SEQ | SFFLYSKLTVDKSRW | | 1542) | | | | |
| | ID NO: | QQGNVFSCSVMHEAL | | | | | | |
| | 1478) | HNHYTQKSLSLSPG | | | | | | |
| | | (SEQ ID NO: 44) | | | | | | |
| PMAB74 | EVQLLE | ASTKGPSVFPLAPSS | GGGSEG | EVQLLES | GGGGSG | DIQMTQS | DIVMTQS | RTVAAPSV |
| | SGGGLV | KSTSGGTAALGCLVK | GGSEGG | GGGLVQP | GGGSGG | PSSLSAS | PDSLAVS | FIFPPSDE |
| | QPGGSL | DYFPEPVTVSWNSGA | GSE | GGSLRLS | GGSGGG | VGDRVTI | LGERATI | QLKSGTAS |
| | RLSCAA | LTSGVHTFPAVLQSS | (SEQ | CAASGFT | GS | TCRASQS | NCKSSQS | VVCLLNNF |
| | SGFTFS | GLYSLSSVVTVPSSS | ID NO: | FSSYWMH | (SEQ | ISSSLAW | VLYSPNN | YPREAKVQ |
| | SYDMSW | LGTQTYICNVNHKPS | 1546) | WVRQAPG | ID NO: | YQQKPGK | KNYLAWY | WKVDNALQ |
| | VRQAPG | NTKVDKKVEPKSCDK | | KCLEWVS | 22) | APKLLIY | QQKPGQP | SGNSQESV |
| | KGLEWV | THTCPPCPAPEAAGA | | YISGSGG | | AASSLQS | PKLLIYW | TEQDSKDS |
| | SGITIS | PSVFLFPPKPKDTLM | | YTNYADS | | GVPSRFS | ASTRESG | TYSLSSTL |
| | GGSTYY | ISRTPEVTCVVVDVS | | VKGRFTI | | GSGSGTD | VPDRFSG | TLSKADYE |
| | ADSVKG | HEDPEVKFNWYVDGV | | SRDNSKN | | FTLTISS | SGSGTDF | KHKVYACE |
| | RFTISR | EVHNAKTKPREEQYN | | TLYLQMN | | LQPEDFA | TLTISSL | VTHQGLSS |
| | DNSKNT | STYRVVSVLTVLHQD | | SLRAEDT | | TYYCQQY | QAEDVAV | PVTKSFNR |
| | LYLQMN | WLNGKEYKCKVSNKA | | AVYYCAR | | KSYPVTF | YYCQQYY | GEC (SEQ |
| | SLRAED | LPAPIEKTISKAKGQ | | DRPYYYD | | GCGTKVE | TTPPTFG | ID NO: |
| | TAVYYC | PREPQVYTLPPSREE | | IDVWGKG | | IK (SEQ | QGTRLEI | 45) |
| | ARGRGG | MTKNQVSLTCLVKGF | | TTVTVSS | | ID NO: | K (SEQ | |
| | SGWLDY | YPSDIAVEWESNGQP | | (SEQ ID | | 1543) | ID NO: | |
| | WGQGTT | ENNYKTTPPVLDSDG | | NO: | | | 1359) | |
| | VTVSS | SFFLYSKLTVDKSRW | | 1544) | | | | |
| | (SEQ | QQGNVFSCSVMHEAL | | | | | | |
| | ID NO: | HNHYTQKSLSLSPG | | | | | | |
| | 1476) | (SEQ ID NO: 44) | | | | | | |
| PMAB75 | EVQLVQ | ASTKGPSVFPLAPSS | GGGSEG | EVQLLES | GGGGSG | DIQMTQS | DIQMTQS | RTVAAPSV |
| | SGAEVK | KSTSGGTAALGCLVK | GGSEGG | GGGLVQP | GGGSGG | PSSLSAS | PSSLSAS | FIFPPSDE |
| | KPGASV | DYFPEPVTVSWNSGA | GSE | GGSLRLS | GGSGGG | VGDRVTI | VGDRVTI | QLKSGTAS |
| | KVSCKA | LTSGVHTFPAVLQSS | (SEQ | CAASGFT | GS | TCRASQS | TCRASQS | VVCLLNNF |
| | SGYSFT | GLYSLSSVVTVPSSS | ID NO: | FSSYWMH | (SEQ | ISSSLAW | ISSYLAW | YPREAKVQ |
| | SYYMHW | LGTQTYICNVNHKPS | 1546) | WVRQAPG | ID NO: | YQQKPGK | YQQKPGK | WKVDNALQ |
| | VRQAPG | NTKVDKKVEPKSCDK | | KCLEWVS | 22) | APKLLIY | APKLLIY | SGNSQESV |
| | QGLEWM | THTCPPCPAPEAAGA | | YISGSGG | | AASSLQS | AASSLQS | TEQDSKDS |
| | GIINPS | PSVFLFPPKPKDTLM | | YTNYADS | | GVPSRFS | GVPSRFS | TYSLSSTL |
| | GGSTSY | ISRTPEVTCVVVDVS | | VKGRFTI | | GSGSGTD | GSGSGTD | TLSKADYE |
| | AQKFQG | HEDPEVKFNWYVDGV | | SRDNSKN | | FTLTISS | FTLTISS | KHKVYACE |
| | RVTMTR | EVHNAKTKPREEQYN | | TLYLQMN | | LQPEDFA | LQPEDFA | VTHQGLSS |
| | DTSTST | STYRVVSVLTVLHQD | | SLRAEDT | | TYYCQQY | TYYCQQS | PVTKSFNR |
| | VYMELS | WLNGKEYKCKVSNKA | | AVYYCAR | | KSYPVTF | YSTPPTF | GEC (SEQ |
| | SLRSED | LPAPIEKTISKAKGQ | | DRPYYYD | | GCGTKVE | GPGTKVD | ID NO: |
| | TAVYYC | PREPQVYTLPPSREE | | IDVWGKG | | IK (SEQ | IK (SEQ | 45) |
| | ASGWVY | MTKNQVSLTCLVKGF | | TTVTVSS | | ID NO: | ID NO: | |
| | WGQGTL | YPSDIAVEWESNGQP | | (SEQ ID | | 1543) | 1479) | |
| | VTVSS | ENNYKTTPPVLDSDG | | NO: | | | | |
| | (SEQ | SFFLYSKLTVDKSRW | | 1544) | | | | |
| | ID NO: | QQGNVFSCSVMHEAL | | | | | | |
| | 1478) | HNHYTQKSLSLSPG | | | | | | |
| | | (SEQ ID NO: 44) | | | | | | |
| PMAB76 | EVQLVQ | ASTKGPSVFPLAPSS | GGGSEG | EVQLLES | GGGGSG | DIQMTQS | DIQMTQS | RTVAAPSV |
| | SGAEVK | KSTSGGTAALGCLVK | GGSEGG | GGGLVQP | GGGSGG | PSSLSAS | PSSLSAS | FIFPPSDE |
| | KPGASV | DYFPEPVTVSWNSGA | GSE | GGSLRLS | GGSGGG | VGDRVTI | VGDRVTI | QLKSGTAS |
| | KVSCKA | LTSGVHTFPAVLQSS | (SEQ | CAASGFT | GS | TCRASQS | TCRASQS | VVCLLNNF |
| | SGYSFT | GLYSLSSVVTVPSSS | ID NO: | FSSYWMH | (SEQ | ISSSLAW | ISSYLAW | YPREAKVQ |
| | SYYMHW | LGTQTYICNVNHKPS | 1546) | WVRQAPG | ID NO: | YQQKPGK | YQQKPGK | WKVDNALQ |
| | VRQAPG | NTKVDKKVEPKSCDK | | KCLEWVS | 22) | APKLLIY | APKLLIY | SGNSQESV |
| | QGLEWM | THTCPPCPAPEAAGA | | YISGSGG | | AASSLQS | AASSLQS | TEQDSKDS |
| | GIINPS | PSVFLFPPKPKDTLM | | YTNYADS | | GVPSRFS | GVPSRFS | TYSLSSTL |
| | GGSTSY | ISRTPEVTCVVVDVS | | VKGRFTI | | GSGSGTD | GSGSGTD | TLSKADYE |
| | AQKFQG | HEDPEVKFNWYVDGV | | SRDNSKN | | FTLTISS | FTLTISS | KHKVYACE |
| | RVTMTR | EVHNAKTKPREEQYN | | TLYLQMN | | LQPEDFA | LQPEDFA | VTHQGLSS |
| | DISTST | STYRVVSVLTVLHQD | | SLRAEDT | | TYYCQQY | TYYCQQS | PVTKSFNR |
| | VYMELS | WLNGKEYKCKVSNKA | | AVYYCAR | | KSYPVTF | YSTPPTF | GEC (SEQ |
| | SLRSED | LPAPIEKTISKAKGQ | | DRPYYYD | | GCGTKVE | GPGTKVD | ID NO: |
| | TAVYYC | PREPQVYTLPPSREE | | LDVWGKG | | IK (SEQ | IK (SEQ | 45) |
| | ASGWVY | MTKNQVSLTCLVKGF | | TTVTVSS | | ID NO: | ID NO: | |
| | WGQGTL | YPSDIAVEWESNGQP | | (SEQ ID | | 1543) | 1479) | |
| | VTVSS | ENNYKTTPPVLDSDG | | NO: | | | | |
| | (SEQ | SFFLYSKLTVDKSRW | | 1545) | | | | |
| | ID NO: | QQGNVFSCSVMHEAL | | | | | | |
| | 1478) | HNHYTQKSLSLSPG | | | | | | |
| | | (SEQ ID NO: 44) | | | | | | |
| PMAB77 | EVQLLE | ASTKGPSVFPLAPSS | GGGSEG | EVQLLES | GGGGSG | DIQMTQS | DIVMTQS | RTVAAPSV |
| | SGGGLV | KSTSGGTAALGCLVK | GGSEGG | GGGLVQP | GGGSGG | PSSLSAS | PDSLAVS | FIFPPSDE |
| | QPGGSL | DYFPEPVTVSWNSGA | GSE | GGSLRLS | GGSGGG | VGDRVTI | LGERATI | QLKSGTAS |
| | RLSCAA | LTSGVHTFPAVLQSS | (SEQ | CAASGFT | GS | TCRASQS | NCKSSQS | VVCLLNNF |
| | SGFTFS | GLYSLSSVVTVPSSS | ID NO: | FSSYWMH | (SEQ | ISSSLAW | VLYSPNN | YPREAKVQ |
| | SYDMSW | LGTQTYICNVNHKPS | 1546) | WVRQAPG | ID NO: | YQQKPGK | KNYLAWY | WKVDNALQ |
| | VRQAPG | NTKVDKKVEPKSCDK | | KCLEWVS | 22) | APKLLIY | QQKPGQP | SGNSQESV |
| | KGLEWV | THTCPPCPAPEAAGA | | YISGSGG | | AASSLQS | PKLLIYW | TEQDSKDS |
| | SGITIS | PSVFLFPPKPKDTLM | | YTNYADS | | GVPSRFS | ASTRESG | TYSLSSTL |
| | GGSTYY | ISRTPEVTCVVVDVS | | VKGRFTI | | GSGSGTD | VPDRFSG | TLSKADYE |
| | ADSVKG | HEDPEVKFNWYVDGV | | SRDNSKN | | FTLTISS | SGSGTDF | KHKVYACE |
| | RFTISR | EVHNAKTKPREEQYN | | TLYLQMN | | LQPEDFA | TLTISSL | VTHQGLSS |
| | DNSKNT | STYRVVSVLTVLHQD | | SLRAEDT | | TYYCQQY | QAEDVAV | PVTKSFNR |
| | LYLQMN | WLNGKEYKCKVSNKA | | AVYYCAR | | KSYPVTF | YYCQQYY | GEC (SEQ |
| | SLRAED | LPAPIEKTISKAKGQ | | DRPYYYD | | GCGTKVE | TTPPTFG | ID NO: |
| | TAVYYC | PREPQVYTLPPSREE | | LDVWGKG | | IK (SEQ | QGTRLEI | 45) |
| | ARGRGG | MTKNQVSLTCLVKGF | | TTVTVSS | | ID NO: | K (SEQ | |
| | SGWLDY | YPSDIAVEWESNGQP | | (SEQ ID | | 1543) | ID NO: | |
| | WGQGTT | ENNYKTTPPVLDSDG | | NO: | | | 1359) | |
| | VTVSS | SFFLYSKLTVDKSRW | | 1545) | | | | |
| | (SEQ | QQGNVFSCSVMHEAL | | | | | | |
| | ID NO: | HNHYTQKSLSLSPG | | | | | | |
| | 1476) | (SEQ ID NO: 44) | | | | | | |

[0553] In some embodiments, the therapeutic comprises one or more sequences, or a combination thereof, selected from the Table 12.

[0554] In some embodiments, the PD-1-MAdCAM antibody comprises an anti-PD-1 Fab as provided for in the following table

TABLE 13

| Clone | | | | | | | | |
|---|---|---|---|---|---|---|---|---|
| (Fab) | Fab VH Seg | Fab VL Seq | HCDR1 | HCDR2 | HCDR3 | LCDR1 | LCDR2 | LCDR3 |
| PMAB1 | EVQLLESGGGL | DIVMTQSPDS | FTFSN | VSGIT | ARGRG | KSSQSV | WASTRE | QQYYTT |
| | VQPGGSLRLSC | LAVSLGERAT | SDMS | ISGGS | GSGWL | LYSPNN | S (SEQ | PPT |
| | AASGFTFSNSD | INCKSSQSVL | (SEQ | TYYA | DY | KNYLA | ID NO: | (SEQ |
| | MSWVRQAPGKG | YSPNNKNYLA | ID NO: | (SEQ | (SEQ | (SEQ | 1485) | ID NO: |
| | LEWVSGITISG | WYQQKPGQPP | 1481) | ID NO: | ID NO: | ID NO: | | 1486) |
| | GSTYYADSVKG | KLLIYWASTR | | 1482) | 1483) | 1484) | | |
| | RFTISRDNSKN | ESGVPDRESG | | | | | | |
| | TLYLQMNSLRA | SGSGTDFTLT | | | | | | |
| | EDTAVYYCARG | ISSLQAEDVA | | | | | | |
| | RGGSGWLDYWG | VYYCQQYYTT | | | | | | |
| | QGTLVTVSS | PPTFGQGTRL | | | | | | |
| | (SEQ ID NO: | EIK (SEQ | | | | | | |
| | 1438) | ID NO: | | | | | | |
| | | 1359) | | | | | | |
| PMAB15 | EVQLLESGGGL | DIVMTQSPDS | FTFSS | VSGIT | ARGRG | KSSQSV | WASTRE | QQYYTT |
| | VQPGGSLRLSC | LAVSLGERAT | YDMS | ISGGS | GSGWL | LYSPNN | S (SEQ | PPT |
| | AASGFTFSSYD | INCKSSQSVL | (SEQ | TYYA | DY | KNYLA | ID NO: | (SEQ |
| | MSWVRQAPGKG | YSPNNKNYLA | ID NO: | (SEQ | (SEQ | (SEQ | 1485) | ID NO: |
| | LEWVSGITISG | WYQQKPGQPP | 1487) | ID NO: | ID NO: | ID NO: | | 1486) |
| | GSTYYADSVKG | KLLIYWASTR | | 1482) | 1483) | 1484) | | |
| | RFTISRDNSKN | ESGVPDRFSG | | | | | | |
| | TLYLQMNSLRA | SGSGTDFTLT | | | | | | |
| | EDTAVYYCARG | ISSLQAEDVA | | | | | | |
| | RGGSGWLDYWG | VYYCQQYYTT | | | | | | |
| | QGTLVTVSS | PPTFGQGTRL | | | | | | |
| | (SEQ ID NO: | EIK (SEQ | | | | | | |
| | 1446) | ID NO: | | | | | | |
| | | 1359) | | | | | | |
| PMAB17 | EVQLLESGGGL | DIVMTQSPDS | FTFSS | VSGIT | ARGRG | KSSQSV | WASTRE | QQYYTT |
| | VQPGGSLRLSC | LAVSLGERAT | YDMS | ISGGS | GSGWL | LYSPNN | S (SEQ | PPT |
| | AASGFTFSSYD | INCKSSQSVL | (SEQ | TYYA | DY | KNYLA | ID NO: | (SEQ |
| | MSWVRQAPGKG | YSPNNKNYLA | ID NO: | (SEQ | (SEQ | (SEQ | 1485) | ID NO: |
| | LEWVSGITISG | WYQQKPGQPP | 1487) | ID NO: | ID NO: | ID NO: | | 1486) |
| | GSTYYADSVKG | KLLIYWASTR | | 1482) | 1483) | 1484) | | |
| | RFTISRDNSKN | ESGVPDRESG | | | | | | |
| | TLYLQMNSLRA | SGSGTDFTLT | | | | | | |
| | EDTAVYYCARG | ISSLQAEDVA | | | | | | |
| | RGGSGWLDYWG | VYYCQQYYTT | | | | | | |
| | QGTDVTVSS | PPTFGQGTRL | | | | | | |
| | (SEQ ID NO: | EIK (SEQ | | | | | | |
| | 1447) | ID NO: | | | | | | |
| | | 1359) | | | | | | |
| PMAB18 | QVQLVQSGAEV | DIQMTQSPSS | YSFTT | MGIIA | ASGWV | QASRDI | AASSLQ | QQSYST |
| | KKPGASVKVSC | LSASVGDRVT | YYMH | PSGGS | Y | KNYLA | S (SEQ | PPT |
| | KASGYSFTTYY | ITCQASRDIK | (SEQ | TSYA | (SEQ | (SEQ | ID NO: | (SEQ |
| | MHWVRQAPGQG | NYLAWYQQKP | ID NO: | (SEQ | ID NO: | ID NO: | 1491) | ID NO: |
| | LEWMGIIAPSG | GKAPKLLIYA | 628) | ID NO: | 1489) | 1490) | | 1492) |
| | GSTSYAQKFQG | ASSLQSGVPS | | 1488) | | | | |
| | RVTMTRDTSTS | RFSGSGSGTD | | | | | | |
| | TVYMELSSLRS | FTLTISSLQP | | | | | | |
| | EDTAVYYCASG | EDFATYYCQQ | | | | | | |
| | WVYWGQGTLVT | SYSTPPTFGP | | | | | | |
| | VSS (SEQ ID | GTKVDIK | | | | | | |
| | NO: 1448) | (SEQ ID | | | | | | |
| | | NO: 1449) | | | | | | |
| PMAB53 | EVQLLESGGGL | DIVMTQSPDS | FTFSS | VSGIT | ARGRG | KSSQSV | WASTRE | QQYYTT |
| | VQPGGSLRLSC | LAVSLGERAT | YDMS | ISGGS | GSGWL | LYSPNN | S (SEQ | PPT |
| | AASGFTFSSYD | INCKSSQSVL | (SEQ | TYYA | DY | KNYLA | ID NO: | (SEQ |
| | MSWVRQAPGKG | YSPNNKNYLA | ID NO: | (SEQ | (SEQ | (SEQ | 1485) | ID NO: |
| | LEWVSGITISG | WYQQKPGQPP | 1487) | ID NO: | ID NO: | ID NO: | | 1486) |
| | GSTYYADSVKG | KLLIYWASTR | | 1482) | 1483) | 1484) | | |
| | RFTISRDNSKN | ESGVPDRESG | | | | | | |
| | TLYLQMNSLRA | SGSGTDFTLT | | | | | | |
| | EDTAVYYCARG | ISSLQAEDVA | | | | | | |
| | RGGSGWLDYWG | VYYCQQYYTT | | | | | | |
| | QGTTVTVSS | PPTFGQGTRL | | | | | | |
| | (SEQ ID NO: | EIK (SEQ | | | | | | |
| | 1476) | ID NO: | | | | | | |
| | | 1359) | | | | | | |
| PMAB54 | EVQLVQSGAEV | DIQMTQSPSS | YSFTS | MGIIN | ASGWV | RASQSI | AASSLQ | QQSYST |
| | KKPGASVKVSC | LSASVGDRVT | YYMH | PSGGS | Y | SSYLA | S (SEQ | PPT |
| | KASGYSFTSYY | ITCRASQSIS | (SEQ | TSYA | (SEQ | (SEQ | ID NO: | (SEQ |
| | MHWVRQAPGQG | SYLAWYQQKP | ID NO: | (SEQ | ID NO: | ID NO: | 1491) | ID NO: |
| | LEWMGIINPSG | GKAPKLLIYA | 766) | ID NO: | 1489) | 1214) | | 1492) |
| | GSTSYAQKFQG | ASSLQSGVPS | | 977) | | | | |
| | RVTMTRDTSTS | RFSGSGSGTD | | | | | | |
| | TVYMELSSLRS | FTLTISSLQP | | | | | | |
| | EDTAVYYCASG | EDFATYYCQQ | | | | | | |
| | WVYWGQGTLVT | SYSTPPTFGP | | | | | | |
| | VSS (SEQ ID | GTKVDIK | | | | | | |
| | NO: 1478) | (SEQ ID | | | | | | |
| | | NO: 1479) | | | | | | |

[0555] In some embodiments, the therapeutic comprises one or more sequences, or a combination thereof, selected from the Table 13.

[0556] In some embodiments, the PD-1-MAdCAM antibody comprises an anti-MAdCAM scFv as provided for in the following table:

TABLE 14

| Clone | | | | | | | | |
|---|---|---|---|---|---|---|---|---|
| (SCFv) | scFv VH Seq | scFv VL Seq | HCDR1 | HCDR2 | HCDR3 | LCDR1 | LCDR2 | LCDR3 |
| PMAB1 | EVQLLESGGGL | DIQMTQSPSS | FTFSD | SYISG | CARDR | RASQSV | SSLQS | QQYKSY |
| | VQPGGSLRLSC | LSASVGDRVT | FWMH | DSGYT | PYYYY | SRSLA | (SEQ | PVT |
| | AASGFTFSDFW | ITCRASQSVS | (SEQ | NYA | MDVW | (SEQ | ID NO: | (SEQ |
| | MHWVRQAPGKG | RSLAWYQQKP | ID | (SEQ | (SEQ | ID NO: | 1497) | ID NO: |
| | LEWISYISGDS | GKAPKLLIYA | NO: | ID | ID | 1496) | | 1498) |
| | GYTNYADSVKG | ASSLQSGVPS | 1493) | NO: | NO: | | | |
| | RFTISRDNSKN | RFSGSGSGTD | | 1494) | 1495) | | | |
| | TLYLQMNSLRA | FTLTISSLQP | | | | | | |
| | EDTAVYYCARD | EDFATYYCQQ | | | | | | |
| | RPYYYYMDVWG | YKSYPVTFGQ | | | | | | |
| | KGTTVTVSS | GTKVEIK | | | | | | |
| | (SEQ ID NO: | (SEQ ID | | | | | | |
| | 591) | NO: 592) | | | | | | |
| PMAB2 | EVQLLESGGGL | DIQMTQSPSS | FTFSS | SAISG | CARDR | RASQSI | SSLQS | QQYKSY |
| | VQPGGSLRLSC | LSASVGDRVT | YWMH | SSGST | PYGYY | SSSLA | (SEQ | PVT |
| | AASGFTFSSYW | ITCRASQSIS | (SEQ | YYA | MDVW | (SEQ | ID NO: | (SEQ |
| | MHWVRQAPGKG | SSLAWYQQKP | ID | (SEQ | (SEQ | ID NO: | 1497) | ID NO: |
| | LEWVSAISGSS | GKAPKLLIYA | NO: | ID | ID | 1502) | | 1498) |
| | GSTYYADSVKG | ASSLQSGVPS | 1499) | NO: | NO: | | | |
| | RFTISRDNSKN | RFSGSGSGTD | | 1500) | 1501) | | | |
| | TLYLQMNSLRA | FTLTISSLQP | | | | | | |
| | EDTAVYYCARD | EDFATYYCQQ | | | | | | |
| | RPYGYYMDVWG | YKSYPVTFGQ | | | | | | |
| | KGTTVTVSS | GTKVEIK | | | | | | |
| | (SEQ ID NO: | (SEQ ID | | | | | | |
| | 1347) | NO: 1367) | | | | | | |
| PMAB3 | EVQLLESGGGL | DIQMTQSPSS | FTFSS | SAISG | CARDR | RASQSI | SSLQS | QQYKSY |
| | VQPGGSLRLSC | LSASVGDRVT | YWMH | SSGST | PYYYY | SSSLA | (SEQ | PVT |
| | AASGFTFSSYW | ITCRASQSIS | (SEQ | YYA | MDVW | (SEQ | ID NO: | (SEQ |
| | MHWVRQAPGKG | SSLAWYQQKP | ID | (SEQ | (SEQ | ID NO: | 1497) | ID NO: |
| | LEWVSAISGSS | GKAPKLLIYA | NO: | ID | ID | 1502) | | 1498) |
| | GSTYYADSVKG | ASSLQSGVPS | 1499) | NO: | NO: | | | |
| | RFTISRDNSKN | RFSGSGSGTD | | 1500) | 1503) | | | |
| | TLYLQMNSLRA | FTLTISSLQP | | | | | | |
| | EDTAVYYCARD | EDFATYYCQQ | | | | | | |
| | RPYYYYMDVWG | YKSYPVTFGQ | | | | | | |
| | KGTTVTVSS | GTKVEIK | | | | | | |
| | (SEQ ID NO: | (SEQ ID | | | | | | |
| | 1439) | NO: 1367) | | | | | | |
| PMAB5 | EVQLLESGGGL | DIQMTQSPSS | FTFSS | SAISG | CARDR | RASQSI | SSLQS | QQYKSY |
| | VQPGGSLRLSC | LSASVGDRVT | YWMH | SSGST | PYYYY | SRSLA | (SEQ | PVT |
| | AASGFTFSSYW | ITCRASQSIS | (SEQ | YYA | MDVW | (SEQ | ID NO: | (SEQ |
| | MHWVRQAPGKG | RSLAWYQQKP | ID | (SEQ | (SEQ | ID NO: | 1497) | ID NO: |
| | LEWVSAISGSS | GKAPKLLIYA | NO: | ID | ID | 1504) | | 1498) |
| | GSTYYADSVKG | ASSLQSGVPS | 1499) | NO: | NO: | | | |
| | RFTISRDNSKN | RFSGSGSGTD | | 1500) | 1503) | | | |
| | TLYLQMNSLRA | FTLTISSLQP | | | | | | |
| | EDTAVYYCARD | EDFATYYCQQ | | | | | | |
| | RPYYYYMDVWG | YKSYPVTFGQ | | | | | | |
| | KGTTVTVSS | GTKVEIK | | | | | | |
| | (SEQ ID NO: | (SEQ ID | | | | | | |
| | 1439) | NO: 1363) | | | | | | |
| PMAB6 | EVQLLESGGGL | DIQMTQSPSS | FTFSS | SAISG | CARDR | RASQSI | SSLQS | QQYKSY |
| | VQPGGSLRLSC | LSASVGDRVT | YWMH | SGGST | PYGYY | SSSLA | (SEQ | PVT |
| | AASGFTFSSYW | ITCRASQSIS | (SEQ | YYA | MDVW | (SEQ | ID NO: | (SEQ |
| | MHWVRQAPGKG | SSLAWYQQKP | ID | (SEQ | (SEQ | ID NO: | 1497) | ID NO: |
| | LEWISAISGSG | GKAPKLLIYA | NO: | ID | ID | 1502) | | 1498) |
| | GSTYYADSVKG | ASSLQSGVPS | 1499) | NO: | NO: | | | |
| | RFTISRDNSKN | RFSGSGSGTD | | 1505) | 1501) | | | |
| | TLYLQMNSLRA | FTLTISSLQP | | | | | | |
| | EDTAVYYCARD | EDFATYYCQQ | | | | | | |
| | RPYGYYMDVWG | YKSYPVTFGQ | | | | | | |
| | KGTTVTVSS | GTKVEIK | | | | | | |
| | (SEQ ID NO: | (SEQ ID | | | | | | |
| | 1440) | NO: 1367) | | | | | | |
| PMAB7 | EVQLLESGGGL | DIQMTQSPSS | FTFSS | SAISG | CARDR | RASQSI | SSLQS | QQYKSY |
| | VQPGGSLRLSC | LSASVGDRVT | YWMH | SGGST | PYYYY | SSSLA | (SEQ | PVT |
| | AASGFTFSSYW | ITCRASQSIS | (SEQ | YYA | MDVW | (SEQ | ID NO: | (SEQ |
| | MHWVRQAPGKG | SSLAWYQQKP | ID | (SEQ | (SEQ | ID NO: | 1497) | ID NO: |
| | LEWISAISGSG | GKAPKLLIYA | NO: | ID | ID | 1502) | | 1498) |
| | GSTYYADSVKG | ASSLQSGVPS | 1499) | NO: | NO: | | | |
| | RFTISRDNSKN | RFSGSGSGTD | | 1505) | 1503) | | | |
| | TLYLQMNSLRA | FTLTISSLQP | | | | | | |
| | EDTAVYYCARD | EDFATYYCQQ | | | | | | |
| | RPYYYYMDVWG | YKSYPVTFGQ | | | | | | |
| | KGTTVTVSS | GTKVEIK | | | | | | |
| | (SEQ ID NO: | (SEQ ID | | | | | | |
| | 1441) | NO: 1367) | | | | | | |
| PMAB8 | EVQLLESGGGL | DIQMTQSPSS | FTFSS | SAISG | CARDR | RASQSI | SSLQS | QQYKSY |
| | VQPGGSLRLSC | LSASVGDRVT | YWMH | SGGST | PYGYY | SRSLA | (SEQ | PVT |
| | AASGFTESSYW | ITCRASQSIS | (SEQ | YYA | MDVW | (SEQ | ID NO: | (SEQ |
| | MHWVRQAPGKG | RSLAWYQQKP | ID | (SEQ | (SEQ | ID NO: | 1497) | ID NO: |
| | LEWISAISGSG | GKAPKLLIYA | NO: | ID | ID | 1504) | | 1498) |
| | GSTYYADSVKG | ASSLQSGVPS | 1499) | NO: | NO: | | | |
| | RFTISRDNSKN | RFSGSGSGTD | | 1505) | 1501) | | | |
| | TLYLQMNSLRA | FTLTISSLQP | | | | | | |
| | EDTAVYYCARD | EDFATYYCQQ | | | | | | |
| | RPYGYYMDVWG | YKSYPVTFGQ | | | | | | |
| | KGTTVTVSS | GTKVEIK | | | | | | |
| | (SEQ ID NO: | (SEQ ID | | | | | | |
| | 1440) | NO: 1363) | | | | | | |
| PMAB9 | EVQLLESGGGL | DIQMTQSPSS | FTFSS | SAISG | CARDR | RASQSI | SSLQS | QQYKSY |
| | VQPGGSLRLSC | LSASVGDRVT | YWMH | SGGST | PYYYY | SRSLA | (SEQ | PVT |
| | AASGFTFSSYW | ITCRASQSIS | (SEQ | YYA | MDVW | (SEQ | ID NO: | (SEQ |
| | MHWVRQAPGKG | RSLAWYQQKP | ID | (SEQ | (SEQ | ID NO: | 1497) | ID NO: |
| | LEWISAISGSG | GKAPKLLIYA | NO: | ID | ID | 1504) | | 1498) |
| | GSTYYADSVKG | ASSLQSGVPS | 1499) | NO: | NO: | | | |
| | RFTISRDNSKN | RFSGSGSGTD | | 1505) | 1503) | | | |
| | TLYLQMNSLRA | FTLTISSLQP | | | | | | |
| | EDTAVYYCARD | EDFATYYCQQ | | | | | | |
| | RPYYYYMDVWG | YKSYPVTFGQ | | | | | | |
| | KGTTVTVSS | GTKVEIK | | | | | | |
| | (SEQ ID NO: | (SEQ ID | | | | | | |
| | 1441) | NO: 1363) | | | | | | |
| PMAB10 | EVQLLESGGGL | DIQMTQSPSS | FTFSS | SAISG | CARDR | RASQSI | SSLQS | QQYKSY |
| | VQPGGSLRLSC | LSASVGDRVT | YWMH | SGGST | PYGYY | SSSLA | (SEQ | PVT |
| | AASGFTESSYW | ITCRASQSIS | (SEQ | YYA | MDVW | (SEQ | ID NO: | (SEQ |
| | MHWVRQAPGKG | SSLAWYQQKP | ID | (SEQ | (SEQ | ID NO: | 1497) | ID NO: |
| | LEWVSAISGSG | GKAPKLLIYA | NO: | ID | ID | 1502) | | 1498) |
| | GSTYYADSVKG | ASSLQSGVPS | 1499) | NO: | NO: | | | |
| | RFTISRDNSKN | RFSGSGSGTD | | 1505) | 1501) | | | |
| | TLYLQMNSLRA | FTLTISSLQP | | | | | | |
| | EDTAVYYCARD | EDFATYYCQQ | | | | | | |
| | RPYGYYMDVWG | YKSYPVTFGQ | | | | | | |
| | KGTTVTVSS | GTKVEIK | | | | | | |
| | (SEQ ID NO: | (SEQ ID | | | | | | |
| | 1442) | NO: 1367) | | | | | | |
| PMAB11 | EVQLLESGGGL | DIQMTQSPSS | FTFSS | SAISG | CARDR | RASQSI | SSLQS | QQYKSY |
| | VQPGGSLRLSC | LSASVGDRVT | YWMH | SGGST | PYYYY | SSSLA | (SEQ | PVT |
| | AASGFTFSSYW | ITCRASQSIS | (SEQ | YYA | MDVW | (SEQ | ID NO: | (SEQ |
| | MHWVRQAPGKG | SSLAWYQQKP | ID | (SEQ | (SEQ | ID NO: | 1497) | ID NO: |
| | LEWVSAISGSG | GKAPKLLIYA | NO: | ID | ID | 1502) | | 1498) |
| | GSTYYADSVKG | ASSLQSGVPS | 1499) | NO: | NO: | | | |
| | RFTISRDNSKN | RFSGSGSGTD | | 1505) | 1503) | | | |
| | TLYLQMNSLRA | FTLTISSLQP | | | | | | |
| | EDTAVYYCARD | EDFATYYCQQ | | | | | | |
| | RPYYYYMDVWG | YKSYPVTFGQ | | | | | | |
| | KGTTVTVSS | GTKVEIK | | | | | | |
| | (SEQ ID NO: | (SEQ ID | | | | | | |
| | 1395) | NO: 1367) | | | | | | |
| PMAB12 | EVQLLESGGGL | DIQMTQSPSS | FTFSS | SAISG | CARDR | RASQSI | SSLQS | QQYKSY |
| | VQPGGSLRLSC | LSASVGDRVT | YWMH | SGGST | PYGYY | SRSLA | (SEQ | PVT |
| | AASGFTFSSYW | ITCRASQSIS | (SEQ | YYA | MDVW | (SEQ | ID NO: | (SEQ |
| | MHWVRQAPGKG | RSLAWYQQKP | ID | (SEQ | (SEQ | ID NO: | 1497) | ID NO: |
| | LEWVSAISGSG | GKAPKLLIYA | NO: | ID | ID | 1504) | | 1498) |
| | GSTYYADSVKG | ASSLQSGVPS | 1499) | NO: | NO: | | | |
| | RFTISRDNSKN | RFSGSGSGTD | | 1505) | 1501) | | | |
| | TLYLQMNSLRA | FTLTISSLQP | | | | | | |
| | EDTAVYYCARD | EDFATYYCQQ | | | | | | |
| | RPYGYYMDVWG | YKSYPVTFGQ | | | | | | |
| | KGTTVTVSS | GTKVEIK | | | | | | |
| | (SEQ ID NO: | (SEQ ID | | | | | | |
| | 1442) | NO: 1363) | | | | | | |
| PMAB13 | EVQLLESGGGL | DIQMTQSPSS | FTFSS | SAISG | CARDR | RASQSI | SSLQS | QQYKSY |
| | VQPGGSLRLSC | LSASVGDRVT | YWMH | SGGST | PYYYY | SRSLA | (SEQ | PVT |
| | AASGFTESSYW | ITCRASQSIS | (SEQ | YYA | MDVW | (SEQ | ID NO: | (SEQ |
| | MHWVRQAPGKG | RSLAWYQQKP | ID | (SEQ | (SEQ | ID NO: | 1497) | ID NO: |
| | LEWVSAISGSG | GKAPKLLIYA | NO: | ID | ID | 1504) | | 1498) |
| | GSTYYADSVKG | ASSLQSGVPS | 1499) | NO: | NO: | | | |
| | RFTISRDNSKN | RFSGSGSGTD | | 1505) | 1503) | | | |
| | TLYLQMNSLRA | FTLTISSLQP | | | | | | |
| | EDTAVYYCARD | EDFATYYCQQ | | | | | | |
| | RPYYYYMDVWG | YKSYPVTFGQ | | | | | | |
| | KGTTVTVSS | GTKVEIK | | | | | | |
| | (SEQ ID NO: | (SEQ ID | | | | | | |
| | 1395) | NO: 1363) | | | | | | |
| PMAB14 | EVQLLESGGGL | DIQMTQSPSS | FTFSS | SYISG | CARDR | RASQSI | SSLQS | QQYKSY |
| | VQPGGSLRLSC | LSASVGDRVT | YWMH | SGGYT | PYGYY | SSSLA | (SEQ | PVT |
| | AASGFTFSSYW | ITCRASQSIS | (SEQ | NYA | MDVW | (SEQ | ID NO: | (SEQ |
| | MHWVRQAPGKG | SSLAWYQQKP | ID | (SEQ | (SEQ | ID NO: | 1497) | ID NO: |
| | LEWVSYISGSG | GKAPKLLIYA | NO: | ID | ID | 1502) | | 1498) |
| | GYTNYADSVKG | ASSLQSGVPS | 1499) | NO: | NO: | | | |
| | RFTISRDNSKN | RFSGSGSGTD | | 1506) | 1501) | | | |
| | TLYLQMNSLRA | FTLTISSLQP | | | | | | |
| | EDTAVYYCARD | EDFATYYCQQ | | | | | | |
| | RPYGYYMDVWG | YKSYPVTFGQ | | | | | | |
| | KGTTVTVSS | GTKVEIK | | | | | | |
| | (SEQ ID NO: | (SEQ ID | | | | | | |
| | 1443) | NO: 1367) | | | | | | |
| PMAB15 | EVQLLESGGGL | DIQMTQSPSS | FTFSS | SAISG | CARDR | RASQSI | SSLQS | QQYKSY |
| | VQPGGSLRLSC | LSASVGDRVT | YWMH | SGGST | PYYYD | SSSLA | (SEQ | PVT |
| | AASGFTESSYW | ITCRASQSIS | (SEQ | YYA | MDVW | (SEQ | ID NO: | (SEQ |
| | MHWVRQAPGKG | SSLAWYQQKP | ID | (SEQ | (SEQ | ID NO: | 1497) | ID NO: |
| | LEWVSAISGSG | GKAPKLLIYA | NO: | ID | ID | 1502) | | 1498) |
| | GSTYYADSVKG | ASSLQSGVPS | 1499) | NO: | NO: | | | |
| | RFTISRDNSKN | RFSGSGSGTD | | 1505) | 1507) | | | |
| | TLYLQMNSLRA | FTLTISSLQP | | | | | | |
| | EDTAVYYCARD | EDFATYYCQQ | | | | | | |
| | RPYYYDMDVWG | YKSYPVTFGQ | | | | | | |
| | KGTTVTVSS | GTKVEIK | | | | | | |
| | (SEQ ID NO: | (SEQ ID | | | | | | |
| | 1444) | NO: 1367) | | | | | | |
| PMAB16 | EVQLLESGGGL | DIQMTQSPSS | FTFSS | SYISG | CARDR | RASQSI | SSLQS | QQYKSY |
| | VQPGGSLRLSC | LSASVGDRVT | YWMH | SGGYT | PYYYD | SSSLA | (SEQ | PVT |
| | AASGFTFSSYW | ITCRASQSIS | (SEQ | NYA | MDVW | (SEQ | ID NO: | (SEQ |
| | MHWVRQAPGKG | SSLAWYQQKP | ID | (SEQ | SEQ | ID NO: | 1497) | ID NO: |
| | LEWVSYISGSG | GKAPKLLIYA | NO: | ID | ID | 1502) | | 1498) |
| | GYTNYADSVKG | ASSLQSGVPS | 1499) | NO: | NO: | | | |
| | RFTISRDNSKN | RFSGSGSGTD | | 1506) | 1507) | | | |
| | TLYLQMNSLRA | FTLTISSLQP | | | | | | |
| | EDTAVYYCARD | EDFATYYCQQ | | | | | | |
| | RPYYYDMDVWG | YKSYPVTFGQ | | | | | | |
| | KGTTVTVSS | GTKVEIK | | | | | | |
| | (SEQ ID NO: | (SEQ ID | | | | | | |
| | 1445) | NO: 1367) | | | | | | |
| PMAB19 | EVQLLESGGGL | DIQMTQSPSS | FTFSS | SYISG | CARDR | RASQSV | SSLQS | QQYKSY |
| | VQPGGSLRLSC | LSASVGDRVT | FWMH | DSGYT | PYYYY | SRSLA | (SEQ | PVT |
| | AASGFTFSSFW | ITCRASQSVS | (SEQ | NYA | MDVW | (SEQ | ID NO: | (SEQ |
| | MHWVRQAPGKG | RSLAWYQQKP | ID | (SEQ | (SEQ | ID NO: | 1497) | ID NO: |
| | LEWISYISGDS | GKAPKLLIYA | NO: | ID | ID | 1496) | | 1498) |
| | GYTNYADSVKG | ASSLQSGVPS | 1508) | NO: | NO: | | | |
| | RFTISRDNSKN | RFSGSGSGTD | | 1494) | 1503) | | | |
| | TLYLQMNSLRA | FTLTISSLQP | | | | | | |
| | EDTAVYYCARD | EDFATYYCQQ | | | | | | |
| | RPYYYYMDVWG | YKSYPVTFGQ | | | | | | |
| | KGTTVTVSS | GTKVEIK | | | | | | |
| | (SEQ ID NO: | (SEQ ID | | | | | | |
| | 1353) | NO: 592) | | | | | | |
| PMAB20 | EVQLLESGGGL | DIQMTQSPSS | FTFSD | SYISG | CARDR | RASQSV | SSLQS | QQYKSY |
| | VQPGGSLRLSC | LSASVGDRVT | YWMH | DSGYT | PYYYY | SRSLA | (SEQ | PVT |
| | AASGFTFSDYW | ITCRASQSVS | (SEQ | NYA | MDVW | (SEQ | ID NO: | (SEQ |
| | MHWVRQAPGKG | RSLAWYQQKP | ID | (SEQ | (SEQ | ID NO: | 1497) | ID NO: |
| | LEWISYISGDS | GKAPKLLIYA | NO: | ID | ID | 1496) | | 1498) |
| | GYTNYADSVKG | ASSLQSGVPS | 1509) | NO: | NO: | | | |
| | RFTISRDNSKN | RFSGSGSGTD | | 1494) | 1503) | | | |
| | TLYLQMNSLRA | FTLTISSLQP | | | | | | |
| | EDTAVYYCARD | EDFATYYCQQ | | | | | | |
| | RPYYYYMDVWG | YKSYPVTFGQ | | | | | | |
| | KGTTVTVSS | GTKVEIK | | | | | | |
| | (SEQ ID NO: | (SEQ ID | | | | | | |
| | 1391) | NO: 592) | | | | | | |
| PMAB21 | EVQLLESGGGL | DIQMTQSPSS | FTFSD | SYISG | CARDR | RASQSV | SSLQS | QQYKSY |
| | VQPGGSLRLSC | LSASVGDRVT | FAMH | DSGYT | PYYYY | SRSLA | (SEQ | PVT |
| | AASGFTFSDFA | ITCRASQSVS | (SEQ | NYA | MDVW | (SEQ | ID NO: | (SEQ |
| | MHWVRQAPGKG | RSLAWYQQKP | ID | (SEQ | (SEQ | ID NO: | 1497) | ID NO: |
| | LEWISYISGDS | GKAPKLLIYA | NO: | ID | ID | 1496) | | 1498) |
| | GYTNYADSVKG | ASSLQSGVPS | 1510) | NO: | NO: | | | |
| | RFTISRDNSKN | RFSGSGSGTD | | 1494) | 1503) | | | |
| | TLYLQMNSLRA | FTLTISSLQP | | | | | | |
| | EDTAVYYCARD | EDFATYYCQQ | | | | | | |
| | RPYYYYMDVWG | YKSYPVTFGQ | | | | | | |
| | KGTTVTVSS | GTKVEIK | | | | | | |
| | (SEQ ID NO: | (SEQ ID | | | | | | |
| | 1450) | NO: 592) | | | | | | |
| PMAB22 | EVQLLESGGGL | DIQMTQSPSS | FTFSD | SYISG | CARDR | RASQSV | SSLQS | QQYKSY |
| | VQPGGSLRLSC | LSASVGDRVT | FWMS | DSGYT | PYYYY | SRSLA | (SEQ | PVT |
| | AASGFTFSDFW | ITCRASQSVS | (SEQ | NYA | MDVW | (SEQ | ID NO: | (SEQ |
| | MSWVRQAPGKG | RSLAWYQQKP | ID | (SEQ | (SEQ | ID NO: | 1497) | ID NO: |
| | LEWISYISGDS | GKAPKLLIYA | NO: | ID | ID | 1496) | | 1498) |
| | GYTNYADSVKG | ASSLQSGVPS | 1511) | NO: | NO: | | | |
| | RFTISRDNSKN | RFSGSGSGTD | | 1494) | 1503) | | | |
| | TLYLQMNSLRA | FTLTISSLQP | | | | | | |
| | EDTAVYYCARD | EDFATYYCQQ | | | | | | |
| | RPYYYYMDVWG | YKSYPVTFGQ | | | | | | |
| | KGTTVTVSS | GTKVEIK | | | | | | |
| | (SEQ ID NO: | (SEQ ID | | | | | | |
| | 1451) | NO: 592) | | | | | | |
| PMAB23 | EVQLLESGGGL | DIQMTQSPSS | FTFSD | SYISG | CARDR | RASQSV | SSLQS | QQYKSY |
| | VQPGGSLRLSC | LSASVGDRVT | FWMH | DSGYT | PYYYY | SRSLA | (SEQ | PVT |
| | AASGFTFSDFW | ITCRASQSVS | (SEQ | NYA | MDVW | (SEQ | ID NO: | (SEQ |
| | MHWVRQAPGKG | RSLAWYQQKP | ID | (SEQ | (SEQ | ID NO: | 1497) | ID NO: |
| | LEWVSYISGDS | GKAPKLLIYA | NO: | ID | ID | 1496) | | 1498) |
| | GYTNYADSVKG | ASSLQSGVPS | 1493) | NO: | NO: | | | |
| | RFTISRDNSKN | RFSGSGSGTD | | 1494) | 1503) | | | |
| | TLYLQMNSLRA | FTLTISSLQP | | | | | | |
| | EDTAVYYCARD | EDFATYYCQQ | | | | | | |
| | RPYYYYMDVWG | YKSYPVTFGQ | | | | | | |
| | KGTTVTVSS | GTKVEIK | | | | | | |
| | (SEQ ID NO: | (SEQ ID | | | | | | |
| | 1452) | NO: 592) | | | | | | |
| PMAB24 | EVQLLESGGGL | DIQMTQSPSS | FTFSD | SAISG | CARDR | RASQSV | SSLQS | QQYKSY |
| | VQPGGSLRLSC | LSASVGDRVT | FWMH | DSGYT | PYYYY | SRSLA | (SEQ | PVT |
| | AASGFTFSDFW | ITCRASQSVS | (SEQ | NYA | MDVW | (SEQ | ID NO: | (SEQ |
| | MHWVRQAPGKG | RSLAWYQQKP | ID | (SEQ | (SEQ | ID NO: | 1497) | ID NO: |
| | LEWISAISGDS | GKAPKLLIYA | NO: | ID | ID | 1496) | | 1498) |
| | GYTNYADSVKG | ASSLQSGVPS | 1493) | NO: | NO: | | | |
| | RFTISRDNSKN | RFSGSGSGTD | | 1512) | 1503) | | | |
| | TLYLQMNSLRA | FTLTISSLQP | | | | | | |
| | EDTAVYYCARD | EDFATYYCQQ | | | | | | |
| | RPYYYYMDVWG | YKSYPVTFGQ | | | | | | |
| | KGTTVTVSS | GTKVEIK | | | | | | |
| | (SEQ ID NO: | (SEQ ID | | | | | | |
| | 1453) | NO: 592) | | | | | | |
| PMAB25 | EVQLLESGGGL | DIQMTQSPSS | FTFSD | SYISG | CARDR | RASQSV | SSLQS | QQYKSY |
| | VQPGGSLRLSC | LSASVGDRVT | FWMH | SSGYT | PYYYY | SRSLA | (SEQ | PVT |
| | AASGFTFSDFW | ITCRASQSVS | SEQ | NYA | MDVW | (SEQ | ID NO: | (SEQ |
| | MHWVRQAPGKG | RSLAWYQQKP | ID | (SEQ | (SEQ | ID NO: | 1497) | ID NO: |
| | LEWISYISGSS | GKAPKLLIYA | NO: | ID | ID | 1496) | | 1498) |
| | GYTNYADSVKG | ASSLQSGVPS | 1493) | NO: | NO: | | | |
| | RFTISRDNSKN | RFSGSGSGTD | | 1513) | 1503) | | | |
| | TLYLQMNSLRA | FTLTISSLQP | | | | | | |
| | EDTAVYYCARD | EDFATYYCQQ | | | | | | |
| | RPYYYYMDVWG | YKSYPVTFGQ | | | | | | |
| | KGTTVTVSS | GTKVEIK | | | | | | |
| | (SEQ ID NO: | (SEQ ID | | | | | | |
| | 1454) | NO: 592) | | | | | | |
| PMAB26 | EVQLLESGGGL | DIQMTQSPSS | FTFSD | SYISG | CARDR | RASQSV | SSLQS | QQYKSY |
| | VQPGGSLRLSC | LSASVGDRVT | FWMH | DGGYT | PYYYY | SRSLA | (SEQ | PVT |
| | AASGFTFSDFW | ITCRASQSVS | (SEQ | NYA | MDVW | (SEQ | ID NO: | (SEQ |
| | MHWVRQAPGKG | RSLAWYQQKP | ID | (SEQ | (SEQ | ID NO: | 1497) | ID NO: |
| | LEWISYISGDG | GKAPKLLIYA | NO: | ID | ID | 1496) | | 1498) |
| | GYTNYADSVKG | ASSLQSGVPS | 1493) | NO: | NO: | | | |
| | RFTISRDNSKN | RFSGSGSGTD | | 1514) | 1503) | | | |
| | TLYLQMNSLRA | FTLTISSLQP | | | | | | |
| | EDTAVYYCARD | EDFATYYCQQ | | | | | | |
| | RPYYYYMDVWG | YKSYPVTFGQ | | | | | | |
| | KGTTVTVSS | GTKVEIK | | | | | | |
| | (SEQ ID NO: | (SEQ ID | | | | | | |
| | 1455) | NO: 592) | | | | | | |
| PMAB27 | EVQLLESGGGL | DIQMTQSPSS | FTFSD | SYISG | CARDR | RASQSV | SSLQS | QQYKSY |
| | VQPGGSLRLSC | LSASVGDRVT | FWMH | DSGST | PYYYY | SRSLA | (SEQ | PVT |
| | AASGFTFSDFW | ITCRASQSVS | (SEQ | NYA | MDVW | (SEQ | ID NO: | (SEQ |
| | MHWVRQAPGKG | RSLAWYQQKP | ID | (SEQ | (SEQ | ID NO: | 1497) | ID NO: |
| | LEWISYISGDS | GKAPKLLIYA | NO: | ID | ID | 1496) | | 1498) |
| | GSTNYADSVKG | ASSLQSGVPS | 1493) | NO: | NO: | | | |
| | RFTISRDNSKN | RFSGSGSGTD | | 1515) | 1503) | | | |
| | TLYLQMNSLRA | FTLTISSLQP | | | | | | |
| | EDTAVYYCARD | EDFATYYCQQ | | | | | | |
| | RPYYYYMDVWG | YKSYPVTFGQ | | | | | | |
| | KGTTVTVSS | GTKVEIK | | | | | | |
| | (SEQ ID NO: | (SEQ ID | | | | | | |
| | 1456) | NO: 592) | | | | | | |
| PMAB28 | EVQLLESGGGL | DIQMTQSPSS | FTFSD | SYISG | CARDR | RASQSV | SSLQS | QQYKSY |
| | VQPGGSLRLSC | LSASVGDRVT | FWMH | DSGYT | PYYYY | SRSLA | (SEQ | PVT |
| | AASGFTFSDFW | ITCRASQSVS | (SEQ | YYA | MDVW | (SEQ | ID NO: | (SEQ |
| | MHWVRQAPGKG | RSLAWYQQKP | ID | (SEQ | (SEQ | ID NO: | 1497) | ID NO: |
| | LEWISYISGDS | GKAPKLLIYA | NO: | ID | ID | 1496) | | 1498) |
| | GYTYYADSVKG | ASSLQSGVPS | 1493) | NO: | NO: | | | |
| | RFTISRDNSKN | RFSGSGSGTD | | 1516) | 1503) | | | |
| | TLYLQMNSLRA | FTLTISSLQP | | | | | | |
| | EDTAVYYCARD | EDFATYYCQQ | | | | | | |
| | RPYYYYMDVWG | YKSYPVTFGQ | | | | | | |
| | KGTTVTVSS | GTKVEIK | | | | | | |
| | (SEQ ID NO: | (SEQ ID | | | | | | |
| | 1457) | NO: 592) | | | | | | |
| PMAB29 | EVQLLESGGGL | DIQMTQSPSS | FTFSD | SYISG | CARDR | RASQSV | SSLQS | QQYKSY |
| | VQPGGSLRLSC | LSASVGDRVT | FWMH | DSGYT | PYYYY | SRSLA | (SEQ | PVT |
| | AASGFTFSDFW | ITCRASQSVS | (SEQ | NYA | MDVW | (SEQ | ID NO: | (SEQ |
| | MHWVRQAPGKG | RSLAWYQQKP | ID | (SEQ | (SEQ | ID NO: | 1497) | ID NO: |
| | LEWISYISGDS | GKAPKLLIYA | NO: | ID | ID | 1496) | | 1498) |
| | GYTNYAASVKG | ASSLQSGVPS | 1493) | NO: | NO: | | | |
| | RFTISRDNSKN | RFSGSGSGTD | | 1494) | 1503) | | | |
| | TLYLQMNSLRA | FTLTISSLQP | | | | | | |
| | EDTAVYYCARD | EDFATYYCQQ | | | | | | |
| | RPYYYYMDVWG | YKSYPVTFGQ | | | | | | |
| | KGTTVTVSS | GTKVEIK | | | | | | |
| | (SEQ ID NO: | (SEQ ID | | | | | | |
| | 1458) | NO: 592) | | | | | | |
| PMAB30 | EVQLLESGGGL | DIQMTQSPSS | FTFSD | SYISG | CARDR | RASQSV | SSLQS | QQYKSY |
| | VQPGGSLRLSC | LSASVGDRVT | FWMH | DSGYT | PYYYY | SRSLA | (SEQ | PVT |
| | AASGFTFSDFW | ITCRASQSVS | (SEQ | NYA | MDVW | (SEQ | ID NO: | (SEQ |
| | MHWVRQAPGKG | RSLAWYQQKP | ID | (SEQ | (SEQ | ID NO: | 1497) | ID NO: |
| | LEWISYISGDS | GKAPKLLIYA | NO: | ID | ID | 1496) | | 1498) |
| | GYTNYAQSVKG | ASSLQSGVPS | 1493) | NO: | NO: | | | |
| | RFTISRDNSKN | RFSGSGSGTD | | 1494) | 1503) | | | |
| | TLYLQMNSLRA | FTLTISSLQP | | | | | | |
| | EDTAVYYCARD | EDFATYYCQQ | | | | | | |
| | RPYYYYMDVWG | YKSYPVTFGQ | | | | | | |
| | KGTTVTVSS | GTKVEIK | | | | | | |
| | (SEQ ID NO: | (SEQ ID | | | | | | |
| | 1459) | NO: 592) | | | | | | |
| PMAB31 | EVQLLESGGGL | DIQMTQSPSS | FTFSD | SYISG | CARDR | RASQSV | SSLQS | QQYKSY |
| | VQPGGSLRLSC | LSASVGDRVT | FWMH | DSGYT | PYYYY | SRSLA | (SEQ | PVT |
| | AASGFTFSDFW | ITCRASQSVS | (SEQ | NYA | MDVW | (SEQ | ID NO: | (SEQ |
| | MHWVRQAPGKG | RSLAWYQQKP | ID | (SEQ | (SEQ | ID NO: | 1497) | ID NO: |
| | LEWISYISGDS | GKAPKLLIYA | NO: | ID | ID | 1496) | | 1498) |
| | GYTNYADSVKG | ASSLQSGVPS | 1493) | NO: | NO: | | | |
| | RFTISRDASKN | RFSGSGSGTD | | 1494) | 1503) | | | |
| | TLYLQMNSLRA | FTLTISSLQP | | | | | | |
| | EDTAVYYCARD | EDFATYYCQQ | | | | | | |
| | RPYYYYMDVWG | YKSYPVTFGQ | | | | | | |
| | KGTTVTVSS | GTKVEIK | | | | | | |
| | (SEQ ID NO: | (SEQ ID | | | | | | |
| | 1460) | NO: 592) | | | | | | |
| PMAB32 | EVQLLESGGGL | DIQMTQSPSS | FTFSD | SYISG | CARDR | RASQSV | SSLQS | QQYKSY |
| | VQPGGSLRLSC | LSASVGDRVT | FWMH | DSGYT | PYYYY | SRSLA | (SEQ | PVT |
| | AASGFTFSDFW | ITCRASQSVS | (SEQ | NYA | MDVW | (SEQ | ID NO: | (SEQ |
| | MHWVRQAPGKG | RSLAWYQQKP | ID | (SEQ | (SEQ | ID NO: | 1497) | ID NO: |
| | LEWISYISGDS | GKAPKLLIYA | NO: | ID | ID | 1496) | | 1498) |
| | GYTNYADSVKG | ASSLQSGVPS | 1493) | NO: | NO: | | | |
| | RFTISRDQSKN | RFSGSGSGTD | | 1494) | 1503) | | | |
| | TLYLQMNSLRA | FTLTISSLQP | | | | | | |
| | EDTAVYYCARD | EDFATYYCQQ | | | | | | |
| | RPYYYYMDVWG | YKSYPVTFGQ | | | | | | |
| | KGTTVTVSS | GTKVEIK | | | | | | |
| | (SEQ ID NO: | (SEQ ID | | | | | | |
| | 1379) | NO: 592) | | | | | | |
| PMAB33 | EVQLLESGGGL | DIQMTQSPSS | FTFSD | SYISG | CARDR | RASQSV | SSLQS | QQYKSY |
| | VQPGGSLRLSC | LSASVGDRVT | FWMH | DSGYT | PYYYY | SRSLA | (SEQ | PVT |
| | AASGFTFSDFW | ITCRASQSVS | (SEQ | NYA | MDVW | (SEç | ID NO: | (SEQ |
| | MHWVRQAPGKG | RSLAWYQQKP | ID | (SEQ | (SEQ | ID NO: | 1497) | ID NO: |
| | LEWISYISGDS | GKAPKLLIYA | NO: | ID | ID | 1496) | | 1498) |
| | GYTNYADSVKG | ASSLQSGVPS | 1493) | NO: | NO: | | | |
| | RFTISRDNSKN | RFSGSGSGTD | | 1494) | 1503) | | | |
| | TLYLQMASLRA | FTLTISSLQP | | | | | | |
| | EDTAVYYCARD | EDFATYYCQQ | | | | | | |
| | RPYYYYMDVWG | YKSYPVTFGQ | | | | | | |
| | KGTTVTVSS | GTKVEIK | | | | | | |
| | (SEQ ID NO: | (SEQ ID | | | | | | |
| | 1461) | NO: 592) | | | | | | |
| PMAB34 | EVQLLESGGGL | DIQMTQSPSS | FTFSD | SYISG | CARDR | RASQSV | SSLQS | QQYKSY |
| | VQPGGSLRLSC | LSASVGDRVT | FWMH | DSGYT | PYYYY | SRSLA | (SEQ | PVT |
| | AASGFTFSDFW | ITCRASQSVS | (SEQ | NYA | MDVW | (SEQ | ID NO: | (SEQ |
| | MHWVRQAPGKG | RSLAWYQQKP | ID | (SEQ | (SEQ | ID NO: | 1497) | ID NO: |
| | LEWISYISGDS | GKAPKLLIYA | NO: | ID | ID | 1496) | | 1498) |
| | GYTNYADSVKG | ASSLQSGVPS | 1493) | NO: | NO: | | | |
| | RFTISRDNSKN | RFSGSGSGTD | | 1494) | 1503) | | | |
| | TLYLQMGSLRA | FTLTISSLQP | | | | | | |
| | EDTAVYYCARD | EDFATYYCQQ | | | | | | |
| | RPYYYYMDVWG | YKSYPVTFGQ | | | | | | |
| | KGTTVTVSS | GTKVEIK | | | | | | |
| | (SEQ ID NO | (SEQ ID | | | | | | |
| | 1462) | NO: 592) | | | | | | |
| PMAB35 | EVQLLESGGGL | DIQMTQSPSS | FTFSD | SYISG | CARDR | RASQSV | SSLQS | QQYKSY |
| | VQPGGSLRLSC | LSASVGDRVT | FWMH | DSGYT | PYYYY | SRSLA | (SEQ | PVT |
| | AASGFTFSDFW | ITCRASQSVS | (SEQ | NYA | MDVW | (SEQ | ID NO: | (SEQ |
| | MHWVRQAPGKG | RSLAWYQQKP | ID | (SEQ | (SEQ | ID NO: | 1497) | ID NO: |
| | LEWISYISGDS | GKAPKLLIYA | NO: | ID | ID | 1496) | | 1498) |
| | GYTNYADSVKG | ASSLQSGVPS | 1493) | NO: | NO: | | | |
| | RFTISRDNSKN | RFSGSGSGTD | | 1494) | 1503) | | | |
| | TLYLQMQSLRA | FTLTISSLQP | | | | | | |
| | EDTAVYYCARD | EDFATYYCQQ | | | | | | |
| | RPYYYYMDVWG | YKSYPVTFGQ | | | | | | |
| | KGTTVTVSS | GTKVEIK | | | | | | |
| | (SEQ ID NO: | (SEQ ID | | | | | | |
| | 1463) | NO: 592) | | | | | | |
| PMAB36 | EVQLLESGGGL | DIQMTQSPSS | FTFSD | SYISG | CARDR | RASQSI | SSLQS | QQYKSY |
| | VQPGGSLRLSC | LSASVGDRVT | FWMH | DSGYT | PYYYY | SRSLA | (SEQ | PVT |
| | AASGFTFSDFW | ITCRASQSIS | (SEQ | NYA | MDVW | (SEQ | ID NO: | (SEQ |
| | MHWVRQAPGKG | RSLAWYQQKP | ID | (SEQ | (SEQ | ID NO: | 1497) | ID NO: |
| | LEWISYISGDS | GKAPKLLIYA | NO: | ID | ID | 1504) | | 1498) |
| | GYTNYADSVKG | ASSLQSGVPS | 1493) | NO: | NO: | | | |
| | RFTISRDNSKN | RFSGSGSGTD | | 1494) | 1503) | | | |
| | TLYLQMNSLRA | FTLTISSLQP | | | | | | |
| | EDTAVYYCARD | EDFATYYCQQ | | | | | | |
| | RPYYYYMDVWG | YKSYPVTFGQ | | | | | | |
| | KGTTVTVSS | GTKVEIK | | | | | | |
| | (SEQ ID NO: | (SEQ ID | | | | | | |
| | 591) | NO: 1363) | | | | | | |
| PMAB37 | EVQLLESGGGL | DIQMTQSPSS | FTFSD | SYISG | CARDR | RASQSV | SSLQS | QQYKSY |
| | VQPGGSLRLSC | LSASVGDRVT | FWMH | DSGYT | PYYYY | SSSLA | (SEQ | PVT |
| | AASGFTFSDFW | ITCRASQSVS | (SEQ | NYA | MDVW | (SEQ | ID NO: | (SEQ |
| | MHWVRQAPGKG | SSLAWYQQKP | ID | (SEQ | (SEQ | ID NO: | 1497) | ID NO: |
| | LEWISYISGDS | GKAPKLLIYA | NO: | ID | ID | 1517) | | 1498) |
| | GYTNYADSVKG | ASSLQSGVPS | 1493) | NO: | NO: | | | |
| | RFTISRDNSKN | RFSGSGSGTD | | 1494) | 1503) | | | |
| | TLYLQMNSLRA | FTLTISSLQP | | | | | | |
| | EDTAVYYCARD | EDFATYYCQQ | | | | | | |
| | RPYYYYMDVWG | YKSYPVTFGQ | | | | | | |
| | KGTTVTVSS | GTKVEIK | | | | | | |
| | (SEQ ID NO: | (SEQ ID | | | | | | |
| | 591) | NO: 1364) | | | | | | |
| PMAB38 | EVQLLESGGGL | DIQMTQSPSS | FTFSD | SYISG | CARDR | RASQSV | SSLQS | QQYKSY |
| | VQPGGSLRLSC | LSASVGDRVT | FWMH | DSGYT | PYYYY | SRYLA | (SEQ | PVT |
| | AASGFTFSDFW | ITCRASQSVS | (SEQ | NYA | MDVW | (SEQ | ID NO: | (SEQ |
| | MHWVRQAPGKG | RYLAWYQQKP | ID | (SEQ | (SEQ | ID NO: | 1497) | ID NO: |
| | LEWISYISGDS | GKAPKLLIYA | NO: | ID | ID | 1518) | | 1498) |
| | GYTNYADSVKG | ASSLQSGVPS | 1493) | NO: | NO: | | | |
| | RFTISRDNSKN | RFSGSGSGTD | | 1494) | 1503) | | | |
| | TLYLQMNSLRA | FTLTISSLQP | | | | | | |
| | EDTAVYYCARD | EDFATYYCQQ | | | | | | |
| | RPYYYYMDVWG | YKSYPVTFGQ | | | | | | |
| | KGTTVTVSS | GTKVEIK | | | | | | |
| | (SEQ ID NO: | (SEQ ID | | | | | | |
| | 591) | NO: 1365) | | | | | | |
| PMAB39 | EVQLLESGGGL | DIQMTQSPSS | FTFSD | SYISG | CARDR | RASQSV | SSLQS | QQYKSY |
| | VQPGGSLRLSC | LSASVGDRVT | FWMH | DSGYT | PYYYY | SRSLN | (SEQ | PVT |
| | AASGFTFSDFW | ITCRASQSVS | (SEQ | NYA | MDVW | (SEQ | ID NO: | (SEQ |
| | MHWVRQAPGKG | RSLNWYQQKP | ID | (SEQ | (SEQ | ID NO: | 1497) | ID NO: |
| | LEWISYISGDS | GKAPKLLIYA | NO: | ID | ID | 1519) | | 1498) |
| | GYTNYADSVKG | ASSLQSGVPS | 1493) | NO: | NO: | | | |
| | RFTISRDNSKN | RFSGSGSGTD | | 1494) | 1503) | | | |
| | TLYLQMNSLRA | FTLTISSLQP | | | | | | |
| | EDTAVYYCARD | EDFATYYCQQ | | | | | | |
| | RPYYYYMDVWG | YKSYPVTFGQ | | | | | | |
| | KGTTVTVSS | GTKVEIK | | | | | | |
| | (SEQ ID NO: | (SEQ ID | | | | | | |
| | 591) | NO: 1366) | | | | | | |
| PMAB40 | EVQLLESGGGL | DIQMTQSPSS | FTFSD | SYISG | CARDR | RASQSV | SSLQS | QQSKSY |
| | VQPGGSLRLSC | LSASVGDRVT | FWMH | DSGYT | PYYYY | SRSLA | (SEQ | PVT |
| | AASGFTFSDFW | ITCRASQSVS | (SEQ | NYA | MDVW | (SEQ | ID NO: | (SEQ |
| | MHWVRQAPGKG | RSLAWYQQKP | ID | (SEQ | (SEQ | ID NO: | 1497) | ID NO: |
| | LEWISYISGDS | GKAPKLLIYA | NO: | ID | ID | 1496) | | 1520) |
| | GYTNYADSVKG | ASSLQSGVPS | 1493) | NO: | NO: | | | |
| | RFTISRDNSKN | RFSGSGSGTD | | 1494) | 1503) | | | |
| | TLYLQMNSLRA | FTLTISSLQP | | | | | | |
| | EDTAVYYCARD | EDFATYYCQQ | | | | | | |
| | RPYYYYMDVWG | SKSYPVTFGQ | | | | | | |
| | KGTTVTVSS | GTKVEIK | | | | | | |
| | (SEQ ID NO: | (SEQ ID | | | | | | |
| | 591) | NO: 1464) | | | | | | |
| PMAB41 | EVQLLESGGGL | DIQMTQSPSS | FTFSD | SYISG | CARDR | RASQSV | SSLQS | QQYYSY |
| | VQPGGSLRLSC | LSASVGDRVT | FWMH | DSGYT | PYYYY | SRSLA | (SEQ | PVT |
| | AASGFTFSDFW | ITCRASQSVS | (SEQ | NYA | MDVW | (SEQ | ID NO: | (SEQ |
| | MHWVRQAPGKG | RSLAWYQQKP | ID | (SEQ | (SEQ | ID NO: | 1497) | ID NO: |
| | LEWISYISGDS | GKAPKLLIYA | NO: | ID | ID | 1496) | | 1521) |
| | GYTNYADSVKG | ASSLQSGVPS | 1493) | NO: | NO: | | | |
| | RFTISRDNSKN | RFSGSGSGTD | | 1494) | 1503) | | | |
| | TLYLQMNSLRA | FTLTISSLQP | | | | | | |
| | EDTAVYYCARD | EDFATYYCQQ | | | | | | |
| | RPYYYYMDVWG | YYSYPVTFGQ | | | | | | |
| | KGTTVTVSS | GTKVEIK | | | | | | |
| | (SEQ ID NO: | (SEQ ID | | | | | | |
| | 591) | NO: 1465) | | | | | | |
| PMAB42 | EVQLLESGGGL | DIQMTQSPSS | FTFSD | SYISG | CARDR | RASQSV | SSLQS | QQYKST |
| | VQPGGSLRLSC | LSASVGDRVT | FWMH | DSGYT | PYYYY | SRSLA | (SEQ | PVT |
| | AASGFTFSDFW | ITCRASQSVS | (SEQ | NYA | MDVW | (SEQ | ID NO: | (SEQ |
| | MHWVRQAPGKG | RSLAWYQQKP | ID | (SEQ | (SEQ | ID NO: | 1497) | ID NO: |
| | LEWISYISGDS | GKAPKLLIYA | NO: | ID | ID | 1496) | | 1522) |
| | GYTNYADSVKG | ASSLQSGVPS | 1493) | NO: | NO: | | | |
| | RFTISRDNSKN | RFSGSGSGTD | | 1494) | 1503) | | | |
| | TLYLQMNSLRA | FTLTISSLQP | | | | | | |
| | EDTAVYYCARD | EDFATYYCQQ | | | | | | |
| | RPYYYYMDVWG | YKSTPVTFGQ | | | | | | |
| | KGTTVTVSS | GTKVEIK | | | | | | |
| | (SEQ ID NO: | (SEQ ID | | | | | | |
| | 591) | NO: 1466) | | | | | | |
| PMAB43 | EVQLLESGGGL | DIQMTQSPSS | FTFSD | SYISG | CARDR | RASQSV | SSLQS | QQYKSY |
| | VQPGGSLRLSC | LSASVGDRVT | FWMH | DSGYT | PYYYY | SRSLA | (SEQ | PRT |
| | AASGFTFSDFW | ITCRASQSVS | (SEQ | NYA | MDVW | (SEQ | ID NO: | (SEQ |
| | MHWVRQAPGKG | RSLAWYQQKP | ID | (SEQ | (SEQ | ID NO: | 1497) | ID NO: |
| | LEWISYISGDS | GKAPKLLIYA | NO: | ID | ID | 1496) | | 1523) |
| | GYTNYADSVKG | ASSLQSGVPS | 1493) | NO: | NO: | | | |
| | RFTISRDNSKN | RFSGSGSGTD | | 1494) | 1503) | | | |
| | TLYLQMNSLRA | FTLTISSLQP | | | | | | |
| | EDTAVYYCARD | EDFATYYCQQ | | | | | | |
| | RPYYYYMDVWG | YKSYPRTFGQ | | | | | | |
| | KGTTVTVSS | GTKVEIK | | | | | | |
| | (SEQ ID NO | (SEQ ID | | | | | | |
| | 591) | NO: 1467) | | | | | | |
| PMAB44 | EVQLLESGGGL | DIQMTQSPSS | FTFSD | SYISG | CARDR | RASQSV | SSLQS | QQYKSY |
| | VQPGGSLRLSC | LSASVGDRVT | FWMH | DSGYT | PTYYY | SRSLA | (SEQ | PVT |
| | AASGFTFSDFW | ITCRASQSVS | (SEQ | NYA | MDVW | (SEQ | ID NO: | (SEQ |
| | MHWVRQAPGKG | RSLAWYQQKP | ID | (SEQ | (SEQ | ID NO: | 1497) | ID NO: |
| | LEWISYISGDS | GKAPKLLIYA | NO: | ID | ID | 1496) | | 1498) |
| | GYTNYADSVKG | ASSLQSGVPS | 1493) | NO: | NO: | | | |
| | RFTISRDNSKN | RFSGSGSGTD | | 1494) | 1524) | | | |
| | TLYLQMNSLRA | FTLTISSLQP | | | | | | |
| | EDTAVYYCARD | EDFATYYCQQ | | | | | | |
| | RPTYYYMDVWG | YKSYPVTFGQ | | | | | | |
| | KGTTVTVSS | GTKVEIK | | | | | | |
| | (SEQ ID NO: | (SEQ ID | | | | | | |
| | 1390) | NO: 592) | | | | | | |
| PMAB45 | EVQLLESGGGL | DIQMTQSPSS | FTFSD | SYISG | CARDR | RASQSV | SSLQS | QQYKSY |
| | VQPGGSLRLSC | LSASVGDRVT | FWMH | DSGYT | PYDYY | SRSLA | (SEQ | PVT |
| | AASGFTFSDFW | ITCRASQSVS | (SEQ | NYA | MDVW | (SEQ | ID NO: | (SEQ |
| | MHWVRQAPGKG | RSLAWYQQKP | ID | (SEQ | (SEQ | ID NO: | 1497) | ID NO: |
| | LEWISYISGDS | GKAPKLLIYA | NO: | ID | ID | 1496) | | 1498) |
| | GYTNYADSVKG | ASSLQSGVPS | 1493) | NO: | NO: | | | |
| | RFTISRDNSKN | RFSGSGSGTD | | 1494) | 1525) | | | |
| | TLYLQMNSLRA | FTLTISSLQP | | | | | | |
| | EDTAVYYCARD | EDFATYYCQQ | | | | | | |
| | RPYDYYMDVWG | YKSYPVTFGQ | | | | | | |
| | KGTTVTVSS | GTKVEIK | | | | | | |
| | (SEQ ID NO: | (SEQ ID | | | | | | |
| | 1468) | NO: 592) | | | | | | |
| PMAB46 | EVQLLESGGGL | DIQMTQSPSS | FTFSD | SYISG | CARDR | RASQSV | SSLQS | QQYKSY |
| | VQPGGSLRLSC | LSASVGDRVT | FWMH | DSGYT | PYGYY | SRSLA | (SEQ | PVT |
| | AASGFTFSDFW | ITCRASQSVS | (SEç | NYA | MDVW | SEQ | ID NO: | (SEQ |
| | MHWVRQAPGKG | RSLAWYQQKP | ID | (SEQ | SEQ | ID NO: | 1497) | ID NO: |
| | LEWISYISGDS | GKAPKLLIYA | NO: | ID | ID | 1496) | | 1498) |
| | GYTNYADSVKG | ASSLQSGVPS | 1493) | NO: | NO: | | | |
| | RFTISRDNSKN | RFSGSGSGTD | | 1494) | 1501) | | | |
| | TLYLQMNSLRA | FTLTISSLQP | | | | | | |
| | EDTAVYYCARD | EDFATYYCQQ | | | | | | |
| | RPYGYYMDVWG | YKSYPVTFGQ | | | | | | |
| | KGTTVTVSS | GTKVEIK | | | | | | |
| | (SEQ ID NO: | (SEQ ID | | | | | | |
| | 1469) | NO: 592) | | | | | | |
| PMAB47 | EVQLLESGGGL | DIQMTQSPSS | FTFSD | SYISG | CARDR | RASQSV | SSLQS | QQYKSY |
| | VQPGGSLRLSC | LSASVGDRVT | FWMH | DSGYT | PYNYY | SRSLA | (SEQ | PVT |
| | AASGFTFSDFW | ITCRASQSVS | (SEQ | NYA | MDVW | (SEQ | ID NO: | (SEQ |
| | MHWVRQAPGKG | RSLAWYQQKP | ID | (SEQ | (SEQ | ID NO: | 1497) | ID NO: |
| | LEWISYISGDS | GKAPKLLIYA | NO: | ID | ID | 1496) | | 1498) |
| | GYTNYADSVKG | ASSLQSGVPS | 1493) | NO: | NO: | | | |
| | RFTISRDNSKN | RFSGSGSGTD | | 1494) | 1526) | | | |
| | TLYLQMNSLRA | FTLTISSLQP | | | | | | |
| | EDTAVYYCARD | EDFATYYCQQ | | | | | | |
| | RPYNYYMDVWG | YKSYPVTFGQ | | | | | | |
| | KGTTVTVSS | GTKVEIK | | | | | | |
| | (SEQ ID NO: | (SEQ ID | | | | | | |
| | 1470) | NO: 592) | | | | | | |
| PMAB48 | EVQLLESGGGL | DIQMTQSPSS | FTFSD | SYISG | CARDR | RASQSV | SSLQS | QQYKSY |
| | VQPGGSLRLSC | LSASVGDRVT | FWMH | DSGYT | PYSYY | SRSLA | (SEQ | PVT |
| | AASGFTFSDFW | ITCRASQSVS | (SEQ | NYA | MDVW | (SEQ | ID NO: | (SEQ |
| | MHWVRQAPGKG | RSLAWYQQKP | ID | (SEQ | (SEQ | ID NO: | 1497) | ID NO: |
| | LEWISYISGDS | GKAPKLLIYA | NO: | ID | ID | 1496) | | 1498) |
| | GYTNYADSVKG | ASSLQSGVPS | 1493) | NO: | NO: | | | |
| | RFTISRDNSKN | RFSGSGSGTD | | 1494) | 1527) | | | |
| | TLYLQMNSLRA | FTLTISSLQP | | | | | | |
| | EDTAVYYCARD | EDFATYYCQQ | | | | | | |
| | RPYSYYMDVWG | YKSYPVTFGQ | | | | | | |
| | KGTTVTVSS | GTKVEIK | | | | | | |
| | (SEQ ID NO: | (SEQ ID | | | | | | |
| | 1471) | NO: 592) | | | | | | |
| PMAB49 | EVQLLESGGGL | DIQMTQSPSS | FTFSD | SYISG | CARDR | RASQSV | SSLQS | QQYKSY |
| | VQPGGSLRLSC | LSASVGDRVT | FWMH | DSGYT | PYYYD | SRSLA | (SEQ | PVT |
| | AASGFTFSDFW | ITCRASQSVS | (SEQ | NYA | MDVW | (SEQ | ID NO: | (SEQ |
| | MHWVRQAPGKG | RSLAWYQQKP | ID | (SEQ | (SEQ | ID NO: | 1497) | ID NO: |
| | LEWISYISGDS | GKAPKLLIYA | NO: | ID | ID | 1496) | | 1498) |
| | GYTNYADSVKG | ASSLQSGVPS | 1493) | NO: | NO: | | | |
| | RFTISRDNSKN | RFSGSGSGTD | | 1494) | 1507) | | | |
| | TLYLQMNSLRA | FTLTISSLQP | | | | | | |
| | EDTAVYYCARD | EDFATYYCQQ | | | | | | |
| | RPYYYDMDVWG | YKSYPVTFGQ | | | | | | |
| | KGTTVTVSS | GTKVEIK | | | | | | |
| | (SEQ ID NO: | (SEQ ID | | | | | | |
| | 1472) | NO: 592) | | | | | | |
| PMAB50 | EVQLLESGGGL | DIQMTQSPSS | FTFSD | SYISG | CARDR | RASQSV | SSLQS | QQYKSY |
| | VQPGGSLRLSC | LSASVGDRVT | FWMH | DSGYT | PYYYE | SRSLA | (SEQ | PVT |
| | AASGFTFSDFW | ITCRASQSVS | (SEQ | NYA | MDVW | (SEQ | ID NO: | (SEQ |
| | MHWVRQAPGKG | RSLAWYQQKP | ID | (SEQ | (SEQ | ID NO: | 1497) | ID NO: |
| | LEWISYISGDS | GKAPKLLIYA | NO: | ID | ID | 1496) | | 1498) |
| | GYTNYADSVKG | ASSLQSGVPS | 1493) | NO: | NO: | | | |
| | RFTISRDNSKN | RFSGSGSGTD | | 1494) | 1528) | | | |
| | TLYLQMNSLRA | FTLTISSLQP | | | | | | |
| | EDTAVYYCARD | EDFATYYCQQ | | | | | | |
| | RPYYYEMDVWG | YKSYPVTFGQ | | | | | | |
| | KGTTVTVSS | GTKVEIK | | | | | | |
| | (SEQ ID NO: | (SEQ ID | | | | | | |
| | 1473) | NO: 592) | | | | | | |
| PMAB51 | EVQLLESGGGL | DIQMTQSPSS | FTFSD | SYISG | CARDR | RASQSV | SSLQS | QQYKSY |
| | VQPGGSLRLSC | LSASVGDRVT | FWMH | DSGYT | PYYYK | SRSLA | (SEQ | PVT |
| | AASGFTFSDFW | ITCRASQSVS | (SEQ | NYA | MDVW | (SEQ | ID NO: | (SEQ |
| | MHWVRQAPGKG | RSLAWYQQKP | ID | (SEQ | (SEQ | ID NO: | 1497) | ID NO: |
| | LEWISYISGDS | GKAPKLLIYA | NO: | ID | ID | 1496) | | 1498) |
| | GYTNYADSVKG | ASSLQSGVPS | 1493) | NO: | NO: | | | |
| | RFTISRDNSKN | RFSGSGSGTD | | 1494) | 1529) | | | |
| | TLYLQMNSLRA | FTLTISSLQP | | | | | | |
| | EDTAVYYCARD | EDFATYYCQQ | | | | | | |
| | RPYYYKMDVWG | YKSYPVTFGQ | | | | | | |
| | KGTTVTVSS | GTKVEIK | | | | | | |
| | (SEQ ID NO: | (SEQ ID | | | | | | |
| | 1474) | NO: 592) | | | | | | |
| PMAB52 | EVQLLESGGGL | DIQMTQSPSS | FTFSD | SYISG | CARDR | RASQSV | SSLQS | QQYKSY |
| | VQPGGSLRLSC | LSASVGDRVT | FWMH | DSGYT | PYYYS | SRSLA | (SEQ | PVT |
| | AASGFTFSDFW | ITCRASQSVS | (SEQ | NYA | MDVW | (SEQ | ID NO: | (SEQ |
| | MHWVRQAPGKG | RSLAWYQQKP | ID | (SEQ | (SEQ | ID NO: | 1497) | ID NO: |
| | LEWISYISGDS | GKAPKLLIYA | NO: | ID | ID | 1496) | | 1498) |
| | GYTNYADSVKG | ASSLQSGVPS | 1493) | NO: | NO: | | | |
| | RFTISRDNSKN | RFSGSGSGTD | | 1494) | 1530) | | | |
| | TLYLQMNSLRA | FTLTISSLQP | | | | | | |
| | EDTAVYYCARD | EDFATYYCQQ | | | | | | |
| | RPYYYSMDVWG | YKSYPVTFGQ | | | | | | |
| | KGTTVTVSS | GTKVEIK | | | | | | |
| | (SEQ ID NO: | (SEQ ID | | | | | | |
| | 1475) | NO: 592) | | | | | | |
| PMAB53 | EVQLLESGGGL | DIQMTQSPSS | FTFSS | SYISG | CARDR | RASQSI | SSLQS | QQYKSY |
| | VQPGGSLRLSC | LSASVGDRVT | YWMH | SGGYT | PYYYD | SSSLA | (SEQ | PVT |
| | AASGFTESSYW | ITCRASQSIS | (SEQ | NYA | IDVW | (SEQ | ID NO: | (SEQ |
| | MHWVRQAPGKG | SSLAWYQQKP | ID | (SEQ | (SEQ | ID NO: | 1497) | ID NO: |
| | LEWVSYISGSG | GKAPKLLIYA | NO: | ID | ID | 1502) | | 1498) |
| | GYTNYADSVKG | ASSLQSGVPS | 1499) | NO: | NO: | | | |
| | RFTISRDNSKN | RFSGSGSGTD | | 1506) | 1531) | | | |
| | TLYLQMNSLRA | FTLTISSLQP | | | | | | |
| | EDTAVYYCARD | EDFATYYCQQ | | | | | | |
| | RPYYYDIDVWG | YKSYPVTFGQ | | | | | | |
| | KGTTVTVSS | GTKVEIK | | | | | | |
| | (SEQ ID NO: | (SEQ ID | | | | | | |
| | 1477) | NO: 1367) | | | | | | |
| PMAB55 | EVQLLESGGGL | DIQMTQSPSS | FTFSS | SYISG | CARDR | RASQSI | SSLQS | QQYKSY |
| | VQPGGSLRLSC | LSASVGDRVT | YWMH | SGGYT | PYYYD | SSSLA | (SEQ | PVT |
| | AASGFTFSSYW | ITCRASQSIS | (SEQ | NYA | LDVW | (SEQ | ID NO: | (SEQ |
| | MHWVRQAPGKG | SSLAWYQQKP | ID | (SEQ | (SEQ | ID NO: | 1497) | ID NO: |
| | LEWVSYISGSG | GKAPKLLIYA | NO: | ID | ID | 1502) | | 1498) |
| | GYTNYADSVKG | ASSLQSGVPS | 1499) | NO: | NO: | | | |
| | RFTISRDNSKN | RFSGSGSGTD | | 1506) | 1532) | | | |
| | TLYLQMNSLRA | FTLTISSLQP | | | | | | |
| | EDTAVYYCARD | EDFATYYCQQ | | | | | | |
| | RPYYYDLDVWG | YKSYPVTFGQ | | | | | | |
| | KGTTVTVSS | GTKVEIK | | | | | | |
| | (SEQ ID NO: | (SEQ ID | | | | | | |
| | 1480) | NO: 1367) | | | | | | |

[0557] In some embodiments, the therapeutic comprises one or more sequences, or a combination thereof, selected from the Table 14.

[0558] In some embodiments, the therapeutic a Fab PD-1 antibody fused via a linker to a scFv MAdCAM antibody. In some embodiments, the Fab PD-1 antibody is fused to a IgG1 constant domain, wherein said IgG1 constant domain is fused to scFv MAdCAM antibody via a Fc-scFv linker. In some embodiment the scFv MAdCAM antibody comprises an internal scFv linker. In some embodiments, the linker is a peptide linker. In some embodiments, the peptide linker is a glycine/serine linker as provided herein.

[0559] In some embodiments, the PD-1-MAdCAM antibody comprises one or more sequences as shown in Table 12. In some embodiments, the MAdCAM antibody comprises a combination of one or more sequence as shown in Table 12. In some embodiments, the anti-PD-1 antibody is in the Fab format and the anti-MAdCAM antibody is in a scFV format as illustrated in Table 12. In some embodiments, the Fab portion of the antibody comprises a CDR1 from any one of clones PMAB1-54 of Table 13, a CDR2 from any one of clones PMAB1-54 of Table 13, and a CDR3 from any one of clones PMAB1-54 of Table 13. In some embodiments, the Fab portion of the antibody comprises a LCDR1 from any one of clones PMAB1-54 of Table 13, a LCDR2 from any one of clones PMAB1-54 of Table 13, and a LCDR3 from any one of clones PMAB1-54 of Table 13. In some embodiments, the scFv portion of the antibody comprises a CDR1 from any one of clones PMAB1-55 of Table 14, a CDR2 from any one of clones PMAB1-55 of Table 14, and a CDR3 from any one of clones PMAB1-55 of Table 14. In some embodiments, the scFv portion of the antibody comprises a LCDR1 from any one of clones PMAB1-55 of Table 14, a LCDR2 from any one of clones PMAB1-55 of Table 14, and a LCDR3 from any one of clones PMAB1-55 of Table 14. In some embodiments, the amino acid residues of the CDRs shown above contain mutations. In some embodiments, the CDRs contain 1, 2, 3, 4, 5, 6, 7, 8, 9, or 10 substitutions or mutations. In some embodiments, the substitution is a conservative substitution.

[0560] In some embodiments, the PD-1-MAdCAM antibody has a VH region selected from any one of clones PMAB1-77 of Table 12 and a VL region selected from any one of clones PMAB1-77 as set forth in of Table 12. In some embodiments, the antibody comprises a Fab CDR1 from any one of clones PMAB1-54 of Table 13, a Fab CDR2 from any one of clones PMAB1-54 of Table 13, and a Fab CDR3 from any one of clones PMAB1-54 of Table 13, a scFv CDR1 from any one of clones PMAB1-55 of Table 14, a Fab CDR2 from any one of clones PMAB1-55 of Table 14, and a Fab CDR3 from any one of clones PMAB1-55 of Table 14.

[0561] In some embodiments, the variable heavy chain has a Fab HCDR1, HCDR2, and a HCDR3 as set forth for PMAB1 in Table 13. In some embodiments, the variable heavy chain has a Fab HCDR1, HCDR2, and a HCDR3 as set forth for PMAB15 in Table 13. In some embodiments, the variable heavy chain has a Fab HCDR1, HCDR2, and a HCDR3 as set forth for PMAB17 in Table 13. In some embodiments, the variable heavy chain has a Fab HCDR1, HCDR2, and a HCDR3 as set forth for PMAB18 in Table 13. In some embodiments, the variable heavy chain has a Fab HCDR1, HCDR2, and a HCDR3 as set forth for PMAB53 in Table 13. In some embodiments, the variable heavy chain has a Fab HCDR1, HCDR2, and a HCDR3 as set forth for PMAB54 in Table 13.

[0562] In some embodiments, the variable light chain has a Fab LCDR1, LCDR2, and a LCDR3 as set forth for PMAB1 in Table 13. In some embodiments, the variable light chain has a Fab LCDR1, LCDR2, and a LCDR3 as set forth for PMAB15 in Table 13. In some embodiments, the variable light chain has a Fab LCDR1, LCDR2, and a LCDR3 as set forth for PMAB17 in Table 13. In some embodiments, the variable light chain has a Fab LCDR1, LCDR2, and a LCDR3 as set forth for PMAB18 in Table 13. In some embodiments, the variable light chain has a Fab LCDR1, LCDR2, and a LCDR3 as set forth for PMAB53 in Table 13. In some embodiments, the variable light chain has a Fab LCDR1, LCDR2, and a LCDR3 as set forth for PMAB54 in Table 13.

[0563] In some embodiments, the variable heavy chain has a scFv HCDR1, HCDR2, and a HCDR3 as set forth for PMAB1 in Table 14. In some embodiments, the variable heavy chain has a scFv HCDR1, HCDR2, and a HCDR3 as set forth for PMAB2 in Table 14. In some embodiments, the variable heavy chain has a scFv HCDR1, HCDR2, and a HCDR3 as set forth for PMAB3 in Table 14. In some embodiments, the variable heavy chain has a scFv HCDR1, HCDR2, and a HCDR3 as set forth for PMAB5 in Table 14. In some embodiments, the variable heavy chain has a scFv HCDR1, HCDR2, and a HCDR3 as set forth for PMAB6 in Table 14. In some embodiments, the variable heavy chain has a scFv HCDR1, HCDR2, and a HCDR3 as set forth for PMAB7 in Table 14. In some embodiments, the variable heavy chain has a scFv HCDR1, HCDR2, and a HCDR3 as set forth for PMAB8 in Table 14. In some embodiments, the variable heavy chain has a scFv HCDR1, HCDR2, and a HCDR3 as set forth for PMAB9 in Table 14. In some embodiments, the variable heavy chain has a scFv HCDR1, HCDR2, and a HCDR3 as set forth for PMAB10 in Table 14. In some embodiments, the variable heavy chain has a scFv HCDR1, HCDR2, and a HCDR3 as set forth for PMAB11 in Table 14. In some embodiments, the variable heavy chain has a scFv HCDR1, HCDR2, and a HCDR3 as set forth for PMAB12 in Table 14. In some embodiments, the variable heavy chain has a scFv HCDR1, HCDR2, and a HCDR3 as set forth for PMAB13 in Table 14. In some embodiments, the variable heavy chain has a scFv HCDR1, HCDR2, and a HCDR3 as set forth for PMAB14 in Table 14. In some embodiments, the variable heavy chain has a scFv HCDR1, HCDR2, and a HCDR3 as set forth for PMAB15 in Table 14. In some embodiments, the variable heavy chain has a scFv HCDR1, HCDR2, and a HCDR3 as set forth for PMAB16 in Table 14. In some embodiments, the variable heavy chain has a scFv HCDR1, HCDR2, and a HCDR3 as set forth for PMAB19 in Table 14. In some embodiments, the variable heavy chain has a scFv HCDR1, HCDR2, and a HCDR3 as set forth for PMAB20 in Table 14. In some embodiments, the variable heavy chain has a scFv HCDR1, HCDR2, and a HCDR3 as set forth for PMAB21 in Table 14. In some embodiments, the variable heavy chain has a scFv HCDR1, HCDR2, and a HCDR3 as set forth for PMAB22 in Table 14. In some embodiments, the variable heavy chain has a scFv HCDR1, HCDR2, and a HCDR3 as set forth for PMAB23 in Table 14. In some embodiments, the variable heavy chain has a scFv HCDR1, HCDR2, and a HCDR3 as set forth for PMAB24 in Table 14. In some embodiments, the variable heavy chain has a scFv HCDR1, HCDR2, and a HCDR3 as set forth for PMAB25 in Table 14. In some embodiments, the variable heavy chain has a scFv HCDR1, HCDR2, and a HCDR3 as set forth for PMAB26 in Table 14. In some embodiments, the variable heavy chain has a scFv HCDR1, HCDR2, and a HCDR3 as set forth for PMAB27 in Table 14. In some embodiments, the variable heavy chain has a scFv HCDR1, HCDR2, and a HCDR3 as set forth for PMAB28 in Table 14. In some embodiments, the variable heavy chain has a scFv HCDR1, HCDR2, and a HCDR3 as set forth for PMAB29 in Table 14. In some embodiments, the variable heavy chain has a scFv HCDR1, HCDR2, and a HCDR3 as set forth for PMAB30 in Table 14. In some embodiments, the variable heavy chain has a scFv HCDR1, HCDR2, and a HCDR3 as set forth for PMAB31 in Table 14. In some embodiments, the variable heavy chain has a scFv HCDR1, HCDR2, and a HCDR3 as set forth for PMAB32 in Table 14. In some embodiments, the variable heavy chain has a scFv HCDR1, HCDR2, and a HCDR3 as set forth for PMAB33 in Table 14. In some embodiments, the variable heavy chain has a scFv HCDR1, HCDR2, and a HCDR3 as set forth for PMAB34 in Table 14. In some embodiments, the variable heavy chain has a scFv HCDR1, HCDR2, and a HCDR3 as set forth for PMAB35 in Table 14. In some embodiments, the variable heavy chain has a scFv HCDR1, HCDR2, and a HCDR3 as set forth for PMAB36 in Table 14. In some embodiments, the variable heavy chain has a scFv HCDR1, HCDR2, and a HCDR3 as set forth for PMAB37 in Table 14. In some embodiments, the variable heavy chain has a scFv HCDR1, HCDR2, and a HCDR3 as set forth for PMAB38 in Table 14. In some embodiments, the variable heavy chain has a scFv HCDR1, HCDR2, and a HCDR3 as set forth for PMAB39 in Table 14. In some embodiments, the variable heavy chain has a scFv HCDR1, HCDR2, and a HCDR3 as set forth for PMAB40 in Table 14. In some embodiments, the variable heavy chain has a scFv HCDR1, HCDR2, and a HCDR3 as set forth for PMAB41 in Table 14. In some embodiments, the variable heavy chain has a scFv HCDR1, HCDR2, and a HCDR3 as set forth for PMAB42 in Table 14. In some embodiments, the variable heavy chain has a scFv HCDR1, HCDR2, and a HCDR3 as set forth for PMAB43 in Table 14. In some embodiments, the variable heavy chain has a scFv HCDR1, HCDR2, and a HCDR3 as set forth for PMAB44 in Table 14. In some embodiments, the variable heavy chain has a scFv HCDR1, HCDR2, and a HCDR3 as set forth for PMAB45 in Table 14. In some embodiments, the variable heavy chain has a scFv HCDR1, HCDR2, and a HCDR3 as set forth for PMAB46 in Table 14. In some embodiments, the variable heavy chain has a scFv HCDR1, HCDR2, and a HCDR3 as set forth for PMAB47 in Table 14. In some embodiments, the variable heavy chain has a scFv HCDR1, HCDR2, and a HCDR3 as set forth for PMAB48 in Table 14. In some embodiments, the variable heavy chain has a scFv HCDR1, HCDR2, and a HCDR3 as set forth for PMAB49 in Table 14. In some embodiments, the variable heavy chain has a scFv HCDR1, HCDR2, and a HCDR3 as set forth for PMAB50 in Table 14. In some embodiments, the variable heavy chain has a scFv HCDR1, HCDR2, and a HCDR3 as set forth for PMAB51 in Table 14. In some embodiments, the variable heavy chain has a scFv HCDR1, HCDR2, and a HCDR3 as set forth for PMAB52 in Table 14. In some embodiments, the variable heavy chain has a scFv HCDR1, HCDR2, and a HCDR3 as set forth for PMAB53 in Table 14. In some embodiments, the variable heavy chain has a scFv HCDR1, HCDR2, and a HCDR3 as set forth for PMAB55 in Table 14.

[0564] In some embodiments, the variable light chain has a scFv LCDR1, LCDR2, and a LCDR3 as set forth for PMAB1 in Table 14. In some embodiments, the variable light chain has a scFv LCDR1, LCDR2, and a LCDR3 as set forth for PMAB2 in Table 14. In some embodiments, the variable light chain has a scFv LCDR1, LCDR2, and a LCDR3 as set forth for PMAB3 in Table 14. In some embodiments, the variable light chain has a scFv LCDR1, LCDR2, and a LCDR3 as set forth for PMAB5 in Table 14. In some embodiments, the variable light chain has a scFv LCDR1, LCDR2, and a LCDR3 as set forth for PMAB6 in Table 14. In some embodiments, the variable light chain has a scFv LCDR1, LCDR2, and a LCDR3 as set forth for PMAB7 in Table 14. In some embodiments, the variable light chain has a scFv LCDR1, LCDR2, and a LCDR3 as set forth for PMAB8 in Table 14. In some embodiments, the variable light chain has a scFv LCDR1, LCDR2, and a LCDR3 as set forth for PMAB9 in Table 14. In some embodiments, the variable light chain has a scFv LCDR1, LCDR2, and a LCDR3 as set forth for PMAB10 in Table 14. In some embodiments, the variable light chain has a scFv LCDR1, LCDR2, and a LCDR3 as set forth for PMAB11 in Table 14. In some embodiments, the variable light chain has a scFv LCDR1, LCDR2, and a LCDR3 as set forth for PMAB12 in Table 14. In some embodiments, the variable light chain has a scFv LCDR1, LCDR2, and a LCDR3 as set forth for PMAB13 in Table 14. In some embodiments, the variable light chain has a scFv LCDR1, LCDR2, and a LCDR3 as set forth for PMAB14 in Table 14. In some embodiments, the variable light chain has a scFv LCDR1, LCDR2, and a LCDR3 as set forth for PMAB15 in Table 14. In some embodiments, the variable light chain has a scFv LCDR1, LCDR2, and a LCDR3 as set forth for PMAB16 in Table 14. In some embodiments, the variable light chain has a scFv LCDR1, LCDR2, and a LCDR3 as set forth for PMAB19 in Table 14. In some embodiments, the variable light chain has a scFv LCDR1, LCDR2, and a LCDR3 as set forth for PMAB20 in Table 14. In some embodiments, the variable light chain has a scFv LCDR1, LCDR2, and a LCDR3 as set forth for PMAB21 in Table 14. In some embodiments, the variable light chain has a scFv LCDR1, LCDR2, and a LCDR3 as set forth for PMAB22 in Table 14. In some embodiments, the variable light chain has a scFv LCDR1, LCDR2, and a LCDR3 as set forth for PMAB23 in Table 14. In some embodiments, the variable light chain has a scFv LCDR1, LCDR2, and a LCDR3 as set forth for PMAB24 in Table 14. In some embodiments, the variable light chain has a scFv LCDR1, LCDR2, and a LCDR3 as set forth for PMAB25 in Table 14. In some embodiments, the variable light chain has a scFv LCDR1, LCDR2, and a LCDR3 as set forth for PMAB26 in Table 14. In some embodiments, the variable light chain has a scFv LCDR1, LCDR2, and a LCDR3 as set forth for PMAB27 in Table 14. In some embodiments, the variable light chain has a scFv LCDR1, LCDR2, and a LCDR3 as set forth for PMAB28 in Table 14. In some embodiments, the variable light chain has a scFv LCDR1, LCDR2, and a LCDR3 as set forth for PMAB29 in Table 14. In some embodiments, the variable light chain has a scFv LCDR1, LCDR2, and a LCDR3 as set forth for PMAB30 in Table 14. In some embodiments, the variable light chain has a scFv LCDR1, LCDR2, and a LCDR3 as set forth for PMAB31 in Table 14. In some embodiments, the variable light chain has a scFv LCDR1, LCDR2, and a LCDR3 as set forth for PMAB32 in Table 14. In some embodiments, the variable light chain has a scFv LCDR1, LCDR2, and a LCDR3 as set forth for PMAB33 in Table 14. In some embodiments, the variable light chain has a scFv LCDR1, LCDR2, and a LCDR3 as set forth for PMAB34 in Table 14. In some embodiments, the variable light chain has a scFv LCDR1, LCDR2, and a LCDR3 as set forth for PMAB35 in Table 14. In some embodiments, the variable light chain has a scFv LCDR1, LCDR2, and a LCDR3 as set forth for PMAB36 in Table 14. In some embodiments, the variable light chain has a scFv LCDR1, LCDR2, and a LCDR3 as set forth for PMAB37 in Table 14. In some embodiments, the variable light chain has a scFv LCDR1, LCDR2, and a LCDR3 as set forth for PMAB38 in Table 14. In some embodiments, the variable light chain has a scFv LCDR1, LCDR2, and a LCDR3 as set forth for PMAB39 in Table 14. In some embodiments, the variable light chain has a scFv LCDR1, LCDR2, and a LCDR3 as set forth for PMAB40 in Table 14. In some embodiments, the variable light chain has a scFv LCDR1, LCDR2, and a LCDR3 as set forth for PMAB41 in Table 14. In some embodiments, the variable light chain has a scFv LCDR1, LCDR2, and a LCDR3 as set forth for PMAB42 in Table 14. In some embodiments, the variable light chain has a scFv LCDR1, LCDR2, and a LCDR3 as set forth for PMAB43 in Table 14. In some embodiments, the variable light chain has a scFv LCDR1, LCDR2, and a LCDR3 as set forth for PMAB44 in Table 14. In some embodiments, the variable light chain has a scFv LCDR1, LCDR2, and a LCDR3 as set forth for PMAB45 in Table 14. In some embodiments, the variable light chain has a scFv LCDR1, LCDR2, and a LCDR3 as set forth for PMAB46 in Table 14. In some embodiments, the variable light chain has a scFv LCDR1, LCDR2, and a LCDR3 as set forth for PMAB47 in Table 14. In some embodiments, the variable light chain has a scFv LCDR1, LCDR2, and a LCDR3 as set forth for PMAB48 in Table 14. In some embodiments, the variable light chain has a scFv LCDR1, LCDR2, and a LCDR3 as set forth for PMAB49 in Table 14. In some embodiments, the variable light chain has a scFv LCDR1, LCDR2, and a LCDR3 as set forth for PMAB50 in Table 14. In some embodiments, the variable light chain has a scFv LCDR1, LCDR2, and a LCDR3 as set forth for PMAB51 in Table 14. In some embodiments, the variable light chain has a scFv LCDR1, LCDR2, and a LCDR3 as set forth for PMAB52 in Table 14. In some embodiments, the variable light chain has a scFv LCDR1, LCDR2, and a LCDR3 as set forth for PMAB53 in Table 14. In some embodiments, the variable light chain has a scFv LCDR1, LCDR2, and a LCDR3 as set forth for PMAB55 in Table 14.

[0565] In some embodiments, the CDRS are swapped for one another. For example, the Fab HCDR1 of clone PMAB1 can be substituted for the Fab HCDR1 of clone PMAB2, or vice versa. This CDR swapping can be done for any of the Fab HCDRs of the clones provided herein (e.g., HCDR1 for HCDR1; HCDR2 for HCDR2; or HCDR3 for HCDR3) or the Fab LCDRs (e.g., LCDR1 for LCDR1; LCDR2 for LCDR2; or LCDR3 for LCDR3). Furthermore, the CDR swapping can be done for any of the scFv HCDRs of the clones provided herein (e.g., HCDR1 for HCDR1; HCDR2 for HCDR2; or HCDR3 for HCDR3) or the scFv LCDRs (e.g., LCDR1 for LCDR1; LCDR2 for LCDR2; or LCDR3 for LCDR3). Therefore, in some embodiments, the antibody comprises a Fab HCDR1 as set forth in any of PMAB1-54 of Table 13, a HCDR2 as set forth in any of PMAB1-54 of Table 13, a HCDR3 as set forth in any of PMAB1-54 of Table 13, a LCDR1 as set forth in any of PMAB1-54 of Table 13, a LCDR2 as set forth in any of PMAB1-54 of Table 13, a LCDR3 as set forth in any of PMAB1-54 of Table 13, or a variant of any of the foregoing. In some embodiments, the antibody comprises a scFv HCDR1 as set forth in any of PMAB1-55 of Table 14, a HCDR2 as set forth in any of PMAB1-55 of Table 14, a HCDR3 as set forth in any of PMAB1-55 of Table 14, a LCDR1 as set forth in any of PMAB1-55 of Table 14, a LCDR2 as set forth in any of PMAB1-55 of Table 14, a LCDR3 as set forth in any of PMAB1-55 of Table 14, or a variant of any of the foregoing.

[0566] In some embodiments, the VH comprises a sequence as set forth in Table 12. In some embodiments, the VK comprises a sequence as set forth in Table 12. In some embodiments, the Ab comprises a VH and a VK as set forth for the clones in Table 12. In some embodiments, the VH and VK are linked by a linker. In some embodiments, the linker is a peptide linker as provided for herein. In some embodiments, the peptide linker is the linker as provided for in Table 12.

Polypeptides Derived from Reference, e.g., Human Polypeptides

[0567] In some embodiments, a component of a therapeutic molecule is derived from or based on a reference molecule, e.g., in the case of a therapeutic molecule for use in humans, from a naturally occurring human polypeptide. E.g., In some embodiments, all or a part of a CD39 molecule, a CD73 molecule, a cell surface molecule binder, a donor specific targeting moiety, an effector ligand binding molecule, an ICIM binding/modulating moiety, an IIC binding/modulating moiety, an inhibitory immune checkpoint molecule ligand molecule, an inhibitory molecule counter ligand molecule, a SM binding/modulating moiety, a specific targeting moiety, a target ligand binding molecule, or a tissue specific targeting moiety, can be based on or derived from a naturally occurring human polypeptide. E.g., a PD-L1 molecule can be based on or derived from a human PD-L1 sequence.

[0568] In some embodiments, a therapeutic compound component, e.g., a PD-L1 molecule:
[0569] a) comprises all or a portion of, e.g., an active portion of, a naturally occurring form of the human polypeptide;
[0570] b) comprises all or a portion of, e.g., an active portion of, a human polypeptide having a sequence appearing in a database, e.g., GenBank database, on Jan. 11, 2017, a naturally occurring form of the human polypeptide that is not associated with a disease state;
[0571] c) comprises a human polypeptide having a sequence that differs by no more than 1, 2, 3, 4, 5, 10, 20, or 30 amino acid residues from a sequence of a) orb);
[0572] d) comprises a human polypeptide having a sequence that differs at no more than by 1, 2, 3, 4, 5 10, 20, or 30% its amino acids residues from a sequence of a) or b);
[0573] e) comprises a human polypeptide having a sequence that does not differ substantially from a sequence of a) or b); or
[0574] f) comprises a human polypeptide having a sequence of c), d), or e) that does not differ substantially in a biological activity, e.g., ability to enhance or inhibit an immune response, from a human polypeptide having the sequence of a) or b).

[0575] In some embodiments, therapeutic compounds can comprise a plurality of effector binding/modulating moieties. For example, a therapeutic compound can comprise two or more of the following selected from:

[0576] (a) an ICIM binding/modulating moiety; (b) an IIC binding/modulating moiety; (c) an SM binding/modulating moiety, or (d) an ICSM binding/modulating moiety. In some embodiments, for example, a therapeutic compound can comprise a plurality, e.g., two, ICIM binding/modulating moieties (wherein they are the same or different); by way of example, two that activate or agonize PD-1; a plurality, e.g., two, IIC binding/modulating moieties; (wherein they are the same or different); a plurality, e.g., two, SM binding/modulating moieties (wherein they are the same or different), or a plurality, e.g., tow, ICSM binding/modulating moieties (wherein they are the same or different). In some embodiments, the therapeutic compound can comprise an ICIM binding/modulating moiety and an IIC binding/modulating moiety; an ICIM binding/modulating moiety and an SM binding/modulating moiety; an IIC binding/modulating moiety and an SM binding/modulating moiety, an ICIM binding/modulating moiety and an ICSM binding/modulating moiety; an IIC binding/modulating moiety and an ICSM binding/modulating moiety; or an ICSM binding/modulating moiety and an SM binding/modulating moiety. In some embodiments, the therapeutic compound comprises a plurality of targeting moieties. In some embodiments, the targeting moieties can be the same or different.

### Pharmaceutical Compositions and Kits

[0577] In another aspect, the present embodiments provide compositions, e.g., pharmaceutically acceptable compositions, which include a therapeutic compound described herein, formulated together with a pharmaceutically acceptable carrier. As used herein, “pharmaceutically acceptable carrier” includes any and all solvents, dispersion media, isotonic and absorption delaying agents, and the like that are physiologically compatible.

[0578] The carrier can be suitable for intravenous, intramuscular, subcutaneous, parenteral, rectal, local, ophthalmic, topical, spinal or epidermal administration (e.g. by injection or infusion). As used herein, the term “carrier” means a diluent, adjuvant, or excipient with which a compound is administered. In some embodiments, pharmaceutical carriers can also be liquids, such as water and oils, including those of petroleum, animal, vegetable or synthetic origin, such as peanut oil, soybean oil, mineral oil, sesame oil and the like. The pharmaceutical carriers can also be saline, gum acacia, gelatin, starch paste, talc, keratin, colloidal silica, urea, and the like. In addition, auxiliary, stabilizing, thickening, lubricating and coloring agents can be used. The carriers can be used in pharmaceutical compositions comprising the therapeutic compounds provided for herein.

[0579] The compositions and compounds of the embodiments provided for herein may be in a variety of forms. These include, for example, liquid, semi-solid and solid dosage forms, such as liquid solutions (e.g., injectable and infusible solutions), dispersions or suspensions, liposomes and suppositories. The preferred form depends on the intended mode of administration and therapeutic application. Typical compositions are in the form of injectable or infusible solutions. In some embodiments, the mode of administration is parenteral (e.g., intravenous, subcutaneous, intraperitoneal, intramuscular). In some embodiments, the therapeutic molecule is administered by intravenous infusion or injection. In another embodiment, the therapeutic molecule is administered by intramuscular or subcutaneous injection. In another embodiment, the therapeutic molecule is administered locally, e.g., by injection, or topical application, to a target site. The phrases “parenteral administration” and “administered parenterally” as used herein means modes of administration other than enteral and topical administration, usually by injection, and includes, without limitation, intravenous, intramuscular, intraarterial, intrathecal, intracapsular, intraorbital, intracardiac, intradermal, intraperitoneal, transtracheal, subcutaneous, subcuticular, intraarticular, subcapsular, subarachnoid, intraspinal, epidural and intrasternal injection and infusion.

[0580] Therapeutic compositions typically should be sterile and stable under the conditions of manufacture and storage. The composition can be formulated as a solution, microemulsion, dispersion, liposome, or other ordered structure suitable to high therapeutic molecule concentration. Sterile injectable solutions can be prepared by incorporating the active compound (i.e., therapeutic molecule) in the required amount in an appropriate solvent with one or a combination of ingredients enumerated above, as required, followed by filtered sterilization. Generally, dispersions are prepared by incorporating the active compound into a sterile vehicle that contains a basic dispersion medium and the required other ingredients from those enumerated above. In the case of sterile powders for the preparation of sterile injectable solutions, the preferred methods of preparation are vacuum drying and freeze-drying that yields a powder of the active ingredient plus any additional desired ingredient from a previously sterile-filtered solution thereof. The proper fluidity of a solution can be maintained, for example, by the use of a coating such as lecithin, by the maintenance of the required particle size in the case of dispersion and by the use of surfactants. Prolonged absorption of injectable compositions can be brought about by including in the composition an agent that delays absorption, for example, monostearate salts and gelatin.

[0581] As will be appreciated by the skilled artisan, the route and/or mode of administration will vary depending upon the desired results. In certain embodiments, the active compound may be prepared with a carrier that will protect the compound against rapid release, such as a controlled release formulation, including implants, transdermal patches, and microencapsulated delivery systems. Biodegradable, biocompatible polymers can be used, such as ethylene vinyl acetate, polyanhydrides, polyglycolic acid, collagen, polyorthoesters, and polylactic acid. Many methods for the preparation of such formulations are patented or generally known to those skilled in the art. See, e.g., Sustained and Controlled Release Drug Delivery Systems, J. R. Robinson, ed., Marcel Dekker, Inc., New York, 1978.

[0582] In certain embodiments, a therapeutic compound can be orally administered, for example, with an inert diluent or an assimilable edible carrier. The compound (and other ingredients, if desired) may also be enclosed in a hard or soft shell gelatin capsule, compressed into tablets, or incorporated directly into the subject's diet. For oral therapeutic administration, the compounds may be incorporated with excipients and used in the form of ingestible tablets, buccal tablets, troches, capsules, elixirs, suspensions, syrups, wafers, and the like. To administer a compound by other than parenteral administration, it may be necessary to coat the compound with, or co-administer the compound with, a material to prevent its inactivation. Therapeutic compositions can also be administered with medical devices known in the art.

[0583] Dosage regimens are adjusted to provide the optimum desired response (e.g., a therapeutic response). For example, a single bolus may be administered, several divided doses may be administered over time or the dose may be proportionally reduced or increased as indicated by the exigencies of the therapeutic situation. It is especially advantageous to formulate parenteral compositions in dosage unit form for ease of administration and uniformity of dosage. Dosage unit form as used herein refers to physically discrete units suited as unitary dosages for the subjects to be treated; each unit contains a predetermined quantity of active compound calculated to produce the desired therapeutic effect in association with the required pharmaceutical carrier. The specification for the dosage unit forms are dictated by and directly dependent on (a) the unique characteristics of the active compound and the particular therapeutic effect to be achieved, and (b) the limitations inherent in the art of compounding such an active compound for the treatment of sensitivity in individuals.

[0584] An exemplary, non-limiting range for a therapeutically or prophylactically effective amount of a therapeutic compound is 0.1-30 mg/kg, more preferably 1-25 mg/kg. Dosages and therapeutic regimens of the therapeutic compound can be determined by a skilled artisan. In certain embodiments, the therapeutic compound is administered by injection (e.g., subcutaneously or intravenously) at a dose of about 1 to 40 mg/kg, e.g., 1 to 30 mg/kg, e.g., about 5 to 25 mg/kg, about 10 to 20 mg/kg, about 1 to 5 mg/kg, 1 to 10 mg/kg, 5 to 15 mg/kg, 10 to 20 mg/kg, 15 to 25 mg/kg, or about 3 mg/kg. The dosing schedule can vary from e.g., once a week to once every 2, 3, or 4 weeks. In one embodiment, the therapeutic compound is administered at a dose from about 10 to 20 mg/kg every other week. The therapeutic compound can be administered by intravenous infusion at a rate of more than 20 mg/min, e.g., 20-40 mg/min, and typically greater than or equal to 40 mg/min to reach a dose of about 35 to 440 mg/m2, typically about 70 to 310 mg/m2, and more typically, about 110 to 130 mg/m2. In embodiments, the infusion rate of about 110 to 130 mg/m2 achieves a level of about 3 mg/kg. In other embodiments, the therapeutic compound can be administered by intravenous infusion at a rate of less than 10 mg/min, e.g., less than or equal to 5 mg/min to reach a dose of about 1 to 100 mg/m2, e.g., about 5 to 50 mg/m2, about 7 to 25 mg/m2, or, about 10 mg/m2. In some embodiments, the therapeutic compound is infused over a period of about 30 min. It is to be noted that dosage values may vary with the type and severity of the condition to be alleviated. It is to be further understood that for any particular subject, specific dosage regimens should be adjusted over time according to the individual need and the professional judgment of the person administering or supervising the administration of the compositions, and that dosage ranges set forth herein are exemplary only and are not intended to limit the scope or practice of the claimed composition.

[0585] The pharmaceutical compositions may include a “therapeutically effective amount” or a “prophylactically effective amount” of a therapeutic molecule. A “therapeutically effective amount” refers to an amount effective, at dosages and for periods of time necessary, to achieve the desired therapeutic result. A therapeutically effective amount of a therapeutic molecule may vary according to factors such as the disease state, age, sex, and weight of the individual, and the ability of the therapeutic compound to elicit a desired response in the individual. A therapeutically effective amount is also one in which any toxic or detrimental effects of a therapeutic molecule t is outweighed by the therapeutically beneficial effects. A “therapeutically effective dosage” preferably inhibits a measurable parameter, e.g., immune attack at least about 20%, more preferably by at least about 40%, even more preferably by at least about 60%, and still more preferably by at least about 80% relative to untreated subjects. The ability of a compound to inhibit a measurable parameter, e.g., immune attack, can be evaluated in an animal model system predictive of efficacy in transplant rejection or autoimmune disorders. Alternatively, this property of a composition can be evaluated by examining the ability of the compound to inhibit, such inhibition in vitro by assays known to the skilled practitioner.

[0586] A “prophylactically effective amount” refers to an amount effective, at dosages and for periods of time necessary, to achieve the desired prophylactic result. Typically, since a prophylactic dose is used in subjects prior to or at an earlier stage of disease, the prophylactically effective amount will be less than the therapeutically effective amount.

[0587] Also within the scope of the embodiments is a kit comprising a therapeutic compound described herein. The kit can include one or more other elements including: instructions for use; other reagents, e.g., a label, a therapeutic agent, or an agent useful for chelating, or otherwise coupling, a therapeutic molecule to a label or other therapeutic agent, or a radioprotective composition; devices or other materials for preparing the a therapeutic molecule for administration; pharmaceutically acceptable carriers; and devices or other materials for administration to a subject.

[0588] In some embodiments, an isolated nucleic acid is provided, wherein the nucleic acid encodes a polypeptide, an antibody, or antigen binding fragment thereof, as provided for herein. In some embodiments, an expression vector comprising the nucleic acid is provided. In some embodiment, a host cell comprising the isolated nucleic acid as provided for herein, or the vector as provided for herein is provided. In some embodiments, a method of making a polypeptide or antibody as provided for herein is provided. In some embodiments, the method comprises culturing a host cell as provided for herein to make the polypeptide or antibody as provided for herein. In some embodiments, a method of producing an antibody or antigen binding fragment thereof as provide for herein comprises (a) culturing a host cell comprising one or more nucleic acids encoding the antibody or antigen binding fragment thereof in a culture medium under conditions favorable for expression of the one or more nucleic acids and (b) optionally recovering the antibody or antigen binding fragment thereof from the culture medium. In some embodiments, a method of making or producing a polypeptide, or an antibody, or antigen binding fragment thereof, is provided, wherein the polypeptide, or the antibody, or antigen binding fragment thereof, comprises a heavy chain variable region and a light chain variable region, wherein: the heavy chain variable region comprises a variable heavy CDR1 (HCDR1) having at least 90% identity to the amino acid sequence of SEQ ID NO: 1499, a variable heavy CDR2 (HCDR2) having at least 90% identity to the amino acid sequence of SEQ ID NO: 1506, and variable heavy CDR3 (HCDR3) having at least 90% identity to the amino acid sequence of SEQ ID NO: 1507, 1531 or 1532; and the light chain variable region comprises a variable light CDR1 (LCDR1) having at least 90% identity to the amino acid sequence of SEQ ID NO: 1502, a variable light CDR2 (LCDR2) having at least 90% identity to the amino acid sequence of SEQ ID NO: 1497, and a variable light CDR3 (LCDR3) having at least 90% identity to the amino acid sequence of SEQ ID NO: 1498. In some embodiments, a method of making or producing a polypeptide, or an antibody, or antigen binding fragment thereof, is provided, wherein the heavy chain variable region comprises an amino acid sequence of SEQ ID NOs: 1445, 1477, or 1480 and the light chain variable region comprises an amino acid of SEQ ID NO: 1367.

[0589] In some embodiments, a method of making or producing a polypeptide, or an antibody, or antigen binding fragment thereof, is provided, wherein the polypeptide, or the antibody, or antigen binding fragment thereof comprises a heavy chain variable region and a light chain variable region, wherein the heavy chain variable region comprises a variable heavy CDR1 (HCDR1) having at least 90% identity to the amino acid sequence of SEQ ID NO: 1499, a variable heavy CDR2 (HCDR2) having at least 90% identity to the amino acid sequence of SEQ ID NO: 1506, and variable heavy CDR3 (HCDR3) having at least 90% identity to the amino acid sequence of SEQ ID NO: 1507, 1531 or 1532; and the light chain variable region comprises a variable light CDR1 (LCDR1) having at least 90% identity to the amino acid sequence of SEQ ID NO: 1502, a variable light CDR2 (LCDR2) having at least 90% identity to the amino acid sequence of SEQ ID NO: 1497, and a variable light CDR3 (LCDR3) having at least 90% identity to the amino acid sequence of SEQ ID NO: 1498, wherein the method comprises (a) culturing a host cell comprising one or more nucleic acids encoding the antibody or antigen binding fragment thereof in a culture medium under conditions favorable for expression of the one or more nucleic acids encoding the heavy chain variable region comprising a variable heavy CDR1 (HCDR1) having at least 90% identity to the amino acid sequence of SEQ ID NO: 1499, a variable heavy CDR2 (HCDR2) having at least 90% identity to the amino acid sequence of SEQ ID NO: 1506, and variable heavy CDR3 (HCDR3) having at least 90% identity to the amino acid sequence of SEQ ID NO: 1507, 1531 or 1532; and the light chain variable region comprising a variable light CDR1 (LCDR1) having at least 90% identity to the amino acid sequence of SEQ ID NO: 1502, a variable light CDR2 (LCDR2) having at least 90% identity to the amino acid sequence of SEQ ID NO: 1497, and a variable light CDR3 (LCDR3) having at least 90% identity to the amino acid sequence of SEQ ID NO: 1498; and (b) optionally recovering the antibody or antigen binding fragment thereof from the culture medium.

[0590] In some embodiments, a method of making or producing a polypeptide, or an antibody, or antigen binding fragment thereof, is provided, wherein the heavy chain variable region comprises an amino acid sequence of SEQ ID NOs: 1445, 1477, or 1480 and the light chain variable region comprises an amino acid of SEQ ID NO: 1367, wherein the method comprises (a) culturing a host cell comprising one or more nucleic acids encoding the antibody or antigen binding fragment thereof in a culture medium under conditions favorable for expression of the one or more nucleic acids encoding the heavy chain variable region comprising an amino acid sequence of SEQ ID NOs: 1445, 1477, or 1480 and the light chain variable region comprising an amino acid of SEQ ID NO: 1367; and (b) optionally recovering the antibody or antigen binding fragment thereof from the culture medium.

[0591] In some embodiments, embodiments provided herein also include, but are not limited to:
[0592] 1. An antibody that binds to MAdCAM, wherein the antibody comprises one or more amino acid sequence as provided in Table 9, Table 10, Table 11, Table 12, Table 14, or Table 15.
[0593] 2. The antibody of embodiment 1, or antigen binding fragment thereof, wherein the antibody, or antigen binding fragment thereof, comprises:
   [0594] (i) a heavy chain variable region comprising heavy chain CDR1, CDR2, and CDR3 sequences, wherein the heavy chain CDR1 sequence has the amino acid sequence of any of the CDR1 sequences set forth in Table 9, Table 14, or Table 15; the heavy chain CDR2 has the amino acid sequence of any of the CDR2 sequences set forth in Table 9, Table 14, or Table 15; and the heavy chain CDR3 has the amino acid sequence of any of the CDR3 sequences set forth in Table 9, Table 14, or Table 15, or variants of any of the foregoing; and
   [0595] (ii) a light chain variable region comprising light chain CDR1, CDR2, and CDR3 sequences, wherein the light chain CDR1 sequence has the amino acid sequence of any of the CDR1 sequences set forth in Table 9, Table 14, or Table 15; the light chain CDR2 has the amino acid sequence of any of the CDR2 sequences set forth in Table 9, Table 14, or Table 15; and the light chain CDR3 has the amino acid sequence of any of the CDR3 sequences set forth in Table 9, Table 14, or Table 15, or variants of any of the foregoing.
[0596] 3. The antibody of any one of embodiments 1-2, or antigen binding fragment thereof, wherein the antibody, or antigen binding fragment thereof, comprises:
   [0597] i) a heavy chain variable region comprising heavy chain CDR1, CDR2, and CDR3 sequences, wherein the heavy chain CDR1 sequence has the amino acid sequence of SEQ ID NOs: 359; the heavy chain CDR2 has the amino acid sequence of SEQ ID NOs: 170, and the heavy chain CDR3 has the amino acid sequence of SEQ ID NOs: 360, or 1431, or variants of any of the foregoing; and
   [0598] (ii) a light chain variable region comprising light chain CDR1, CDR2, and CDR3 sequences, wherein the light chain CDR1 sequence has the amino acid sequence of SEQ ID NOs: 361, or 1408; the light chain CDR2 has the amino acid sequence of SEQ ID NOs: 362, and the light chain CDR3 has the amino acid sequence of SEQ ID NOs: 363, or variants of any of the foregoing.
[0599] 4. The antibody of any one of embodiments 1-2, or antigen binding fragment thereof, wherein the antibody, or antigen binding fragment thereof, comprises:
   [0600] i) a heavy chain variable region comprising heavy chain CDR1, CDR2, and CDR3 sequences, wherein the heavy chain CDR1 sequence has the amino acid sequence SEQ ID NO: 359, the heavy chain CDR2 has the amino acid sequence of SEQ ID NO: 170, and the heavy chain CDR3 has the amino acid sequence of SEQ ID NO:360, or variants of any of the foregoing; and
   [0601] (ii) a light chain variable region comprising light chain CDR1, CDR2, and CDR3 sequences, wherein the light chain CDR1 sequence has the amino acid sequence of SEQ ID NO: 361, the light chain LCDR2 has the amino acid sequence of SEQ ID NO: 362, and the light chain CDR3 has the amino acid sequence of SEQ ID NO: 363, or variants of any of the foregoing.
[0602] 5. The antibody of any one of embodiments 1-2, or antigen binding fragment thereof, wherein the antibody, or antigen binding fragment thereof, comprises:
   [0603] i) a heavy chain variable region comprising heavy chain CDR1, CDR2, and CDR3 sequences, wherein the heavy chain CDR1 sequence has the amino acid sequence SEQ ID NO: 359, the heavy chain CDR2 has the amino acid sequence of SEQ ID NO: 170, and the heavy chain CDR3 has the amino acid sequence of SEQ ID NO: 1431, or variants of any of the foregoing; and
   [0604] (ii) a light chain variable region comprising light chain CDR1, CDR2, and CDR3 sequences, wherein the light chain CDR1 sequence has the amino acid sequence of SEQ ID NO: 1408, the light chain LCDR2 has the amino acid sequence of SEQ ID NO: 362, and the light chain CDR3 has the amino acid sequence of SEQ ID NO: 363, or variants of any of the foregoing.
[0605] 6. The antibody of any one of embodiments 1-2, or antigen binding fragment thereof, wherein the antibody, or antigen binding fragment thereof, comprises:
   [0606] i) a heavy chain variable region comprising heavy chain CDR1, CDR2, and CDR3 sequences, wherein the heavy chain CDR1 sequence has the amino acid sequence of SEQ ID NOs: 135; the heavy chain CDR2 has the amino acid sequence of SEQ ID NOs: 381, and the heavy chain CDR3 has the amino acid sequence of SEQ ID NOs: 1342, or variants of any of the foregoing; and
   [0607] (ii) a light chain variable region comprising light chain CDR1, CDR2, and CDR3 sequences, wherein the light chain CDR1 sequence has the amino acid sequence of SEQ ID NOs: 383; the light chain CDR2 has the amino acid sequence of SEQ ID NOs: 241, and the light chain CDR3 has the amino acid sequence of SEQ ID NOs: 652, or variants of any of the foregoing.
[0608] 7. The antibody of any one of embodiments 1-2, or antigen binding fragment thereof, wherein the antibody, or antigen binding fragment thereof, comprises:
   [0609] i) a heavy chain variable region comprising heavy chain CDR1, CDR2, and CDR3 sequences, wherein the heavy chain CDR1 sequence has the amino acid sequence SEQ ID NO: 135, the heavy chain CDR2 has the amino acid sequence of SEQ ID NO: 381, and the heavy chain CDR3 has the amino acid sequence of SEQ ID NO: 1342, or variants of any of the foregoing; and
   [0610] (ii) a light chain variable region comprising light chain CDR1, CDR2, and CDR3 sequences, wherein the light chain CDR1 sequence has the amino acid sequence of SEQ ID NO: 383, the light chain LCDR2 has the amino acid sequence of SEQ ID NO: 241, and the light chain CDR3 has the amino acid sequence of SEQ ID NO: 652, or variants of any of the foregoing.
[0611] 8. The antibody of any one of the preceding embodiments, wherein the heavy chain variable region and the light chain variable region are in a scFv format.
[0612] 9. The antibody of any one of the preceding embodiments, wherein the heavy chain variable region and the light chain variable region are in a Fab format.
[0613] 10. The antibody of any one of embodiments 6-7, wherein the heavy chain variable region and the light variable chain region are linked with a peptide linker, such as a glycine/serine linker.
[0614] 11. The antibody of embodiment 1, or antigen binding fragment thereof, wherein the antibody comprises a VK/VL sequence as shown in Table 9, Table 10, Table 11, Table 12, Table 14, or Table 15.
[0615] 12. The antibody of embodiment 9, wherein the VK/VL sequence comprises a sequence of SEQ ID NOs: 592, 663, 667, 669, 670, 671, 673, 674, 675, 677, 678, 679, 680, 681, 682, 683, 684, 685, 686, 687, 689, 690, 692, 694, 696, 698, 700, 702, 704, 706, 708, 710, 713, 715, 717, 719, 721, 723, 725, 727, 729, 731, 733, 735, 737, 739, 741, 743, 745, 747, 749, 751, 753, 755, 757, 759, 761, 763, 765, 768, 770, 772, 774, 776, 778, 780, 782, 784, 786, 788, 790, 792, 794, 796, 798, 800, 802, 804, 806, 808, 810, 812, 814, 816, 818, 820, 822, 824, 826, 828, 830, 832, 834, 836, 838, 840, 841, 843, 845, 847, 848, 850, 852, 853, 855, 857, 859, 861, 863, 864, 866, 868, 870, 872, 874, 875, 876, 878, 882, 1360, 1361, 1362, 1363, 1364, 1365, 1366, 1367, 1368, 1369, 1370, 1371, 1372, 1373, 1374, 1375, 1376, 1380, 1381, 1382, 1383, 1384, 1385, 1386, 1464, 1465, 1466, 1467, 1535, 1536, 1537, or 1543.
[0616] 11. The antibody of embodiments 1, 9, or 10, or antigen binding fragment thereof, wherein the antibody comprises a VH sequence as shown in Table 9, Table 10, Table 11, Table 12, Table 14, or Table 15.
[0617] 12. The antibody of embodiment 11, wherein the VH sequence comprises a sequence of SEQ ID NOs: 591, 662, 664, 665, 666, 668, 672, 676, 688, 691, 693, 695, 697, 699, 701, 703, 705, 707, 709, 711, 712, 714, 716, 718, 720, 722, 724, 726, 728, 730, 732, 734, 736, 738, 740, 742, 744, 746, 748, 750, 752, 754, 756, 758, 760, 762, 764, 767, 769, 771, 773, 775, 777, 779, 781, 783, 785, 787, 789, 791, 793, 795, 797, 799, 801, 803, 805, 807, 809, 811, 813, 815, 817, 819, 821, 823, 825, 827, 829, 831, 833, 835, 837, 839, 841, 842, 844, 846, 849, 851, 854, 856, 858, 860, 862, 865, 867, 869, 871, 873, 877, 879, 880, 881, 1346, 1347, 1348, 1349, 1350, 1351, 1352, 1353, 1354, 1355, 1356, 1357, 1358, 1377, 1378, 1379, 1387, 1388, 1389, 1390, 1391, 1392, 1393, 1394, 1395, 1396, 1397, 1398, 1439, 1440, 1441, 1442, 1443, 1444, 1445, 1450, 1451, 1452, 1453, 1454, 1455, 1456, 1457, 1458, 1459, 1460, 1461, 1462, 1463, 1469, 1470, 1471, 1472, 1473, 1474, 1475, 1477, 1480, 1533, 1534, 1542, 1544, or 1545.
[0618] 13. The antibody of embodiment 1, or antigen binding fragment thereof, wherein the antibody comprises a VK sequence as shown in Table 9, Table 10, Table 11, Table 12, Table 14, or Table 15, and a VH sequence as shown in Table 9, Table 10, Table 11, Table 12, Table 14, or Table 15.
[0619] 14. The antibody of embodiment 13, or antigen binding fragment thereof, wherein the antibody comprises a VK of SEQ ID NO: 592, or a variant thereof and a VH sequence of SEQ ID NO: 591, or a variant thereof.
[0620] 15. The antibody of embodiment 13 or antigen binding fragment thereof, wherein the antibody comprises a VK of SEQ ID NO: 1363, or a variant thereof, and a VH sequence of SEQ ID NO: 1387, or a variant thereof.
[0621] 16. An antibody, or antigen binding fragment thereof, comprising a heavy chain variable region and a light chain variable region, wherein:
   [0622] the heavy chain variable region comprises a variable heavy CDR1 (HCDR1) having at least 90% identity to the amino acid sequence of SEQ ID NO: 1499, a variable heavy CDR2 (HCDR2) having at least 90% identity to the amino acid sequence of SEQ ID NO: 1506, and variable heavy CDR3 (HCDR3) having at least 90% identity to the amino acid sequence of SEQ ID NO: 1507, 1531 or 1532; and
   [0623] the light chain variable region comprises a variable light CDR1 (LCDR1) having at least 90% identity to the amino acid sequence of SEQ ID NO: 1502, a variable light CDR2 (LCDR2) having at least 90% identity to the amino acid sequence of SEQ ID NO: 1497, and a variable light CDR3 (LCDR3) having at least 90% identity to the amino acid sequence of SEQ ID NO: 1498.
[0624] 17. The antibody of embodiment 16, wherein the heavy chain variable region comprises a HCDR1 comprising the amino acid sequence of SEQ ID NO: 1499, a HCDR2 comprising the amino acid sequence of SEQ ID NO: 1506, and a HCDR3 comprising the amino acid sequence of SEQ ID NO: 1507.
[0625] 18. The antibody of embodiment 16, wherein the heavy chain variable region comprises a HCDR1 comprising the amino acid sequence of SEQ ID NO: 1499, a HCDR2 comprising the amino acid sequence of SEQ ID NO: 1506, and a HCDR3 comprising the amino acid sequence of SEQ ID NO: 1531.
[0626] 19. The antibody of embodiment 16, wherein the heavy chain variable region comprises a HCDR1 comprising the amino acid sequence of SEQ ID NO: 1499, a HCDR2 comprising the amino acid sequence of SEQ ID NO: 1506, and a HCDR3 comprising the amino acid sequence of SEQ ID NO: 1532.
[0627] 20. The antibody of any one of embodiments 16-19, wherein the light chain variable region comprises a LCDR1 comprising the amino acid sequence of SEQ ID NO: 1502, a LCDR2 comprising the amino acid sequence of SEQ ID NO: 1497, and a LCDR3 comprising the amino acid sequence of SEQ ID NO: 1498.
[0628] 21. An antibody, or antigen binding fragment thereof, wherein the antibody comprises: a light chain variable region comprising an amino acid sequence having at least 90% identity an amino acid sequence selected from SEQ ID NOs: 592, 663, 667, 669, 670, 671, 673, 674, 675, 677, 678, 679, 680, 681, 682, 683, 684, 685, 686, 687, 689, 690, 692, 694, 696, 698, 700, 702, 704, 706, 708, 710, 713, 715, 717, 719, 721, 723, 725, 727, 729, 731, 733, 735, 737, 739, 741, 743, 745, 747, 749, 751, 753, 755, 757, 759, 761, 763, 765, 768, 770, 772, 774, 776, 778, 780, 782, 784, 786, 788, 790, 792, 794, 796, 798, 800, 802, 804, 806, 808, 810, 812, 814, 816, 818, 820, 822, 824, 826, 828, 830, 832, 834, 836, 838, 840, 841, 843, 845, 847, 848, 850, 852, 853, 855, 857, 859, 861, 863, 864, 866, 868, 870, 872, 874, 875, 876, 878, 882, 1360, 1361, 1362, 1363, 1364, 1365, 1366, 1367, 1368, 1369, 1370, 1371, 1372, 1373, 1374, 1375, 1376, 1380, 1381, 1382, 1383, 1384, 1385, 1386, 1464, 1465, 1466, 1467, 1535, 1536, 1537, or 1543; and the variable heavy chain comprising an amino acid sequence having at least 90% identity an amino acid sequence selected from SEQ ID NOs: 591, 662, 664, 665, 666, 668, 672, 676, 688, 691, 693, 695, 697, 699, 701, 703, 705, 707, 709, 711, 712, 714, 716, 718, 720, 722, 724, 726, 728, 730, 732, 734, 736, 738, 740, 742, 744, 746, 748, 750, 752, 754, 756, 758, 760, 762, 764, 767, 769, 771, 773, 775, 777, 779, 781, 783, 785, 787, 789, 791, 793, 795, 797, 799, 801, 803, 805, 807, 809, 811, 813, 815, 817, 819, 821, 823, 825, 827, 829, 831, 833, 835, 837, 839, 841, 842, 844, 846, 849, 851, 854, 856, 858, 860, 862, 865, 867, 869, 871, 873, 877, 879, 880, 881, 1346, 1347, 1348, 1349, 1350, 1351, 1352, 1353, 1354, 1355, 1356, 1357, 1358, 1377, 1378, 1379, 1387, 1388, 1389, 1390, 1391, 1392, 1393, 1394, 1395, 1396, 1397, 1398, 1439, 1440, 1441, 1442, 1443, 1444, 1445, 1450, 1451, 1452, 1453, 1454, 1455, 1456, 1457, 1458, 1459, 1460, 1461, 1462, 1463, 1469, 1470, 1471, 1472, 1473, 1474, 1475, 1477, 1480, 1533, 1534, 1542, 1544, or 1545.
[0629] 22. The antibody of any one of embodiments 16-21, or antigen binding fragment thereof, wherein the heavy chain variable region comprises an amino acid sequence having at least 90% identity to the amino acid sequence of SEQ ID NO: 1445, 1477, or 1480 and the light chain variable region comprises an amino acid sequence having at least 90% identity to the amino acid sequence of SEQ ID NO: 1367.
[0630] 23. The antibody of any one of embodiments 16-22, or antigen binding fragment thereof, wherein the heavy chain variable region comprises an amino acid sequence of SEQ ID NOs: 1445, 1477, or 1480 and the light chain variable region comprises an amino acid of SEQ ID NO: 1367.
[0631] 24. The antibody of embodiment 23, or antigen binding fragment thereof, wherein the heavy chain variable region comprises the amino acid sequence of SEQ ID NO: 1445.
[0632] 25. The antibody of embodiment 23, or antigen binding fragment thereof, wherein the heavy chain variable region comprises the amino acid sequence of SEQ ID NO: 1477.
[0633] 26. The antibody of embodiment 23, or antigen binding fragment thereof, wherein the heavy chain variable region comprises the amino acid sequence of SEQ ID NO: 1480.
[0634] 27. The antibody of any one of embodiments 16-26, or antigen binding fragment thereof, wherein the heavy chain variable region and the light chain variable region are in a scFv format or a Fab format.
[0635] 28. The antibody of any one of embodiments 16-27, or antigen binding fragment thereof, wherein the heavy chain variable region and the light chain variable region are in a scFv format.
[0636] 29. The antibody of any one of embodiments 16-28, or antigen binding fragment thereof, wherein the heavy chain variable region and the light variable chain region are linked with a peptide linker.
[0637] 30. The antibody of embodiment 29, wherein the peptide linker is a glycine/serine linker.
[0638] 31. The antibody of embodiment 30, wherein the peptide linker comprises a sequence of GGGGSGGGGSGGGGSGGGGS (SEQ ID NO: 22), GGGGSGGGGSGGGGS (SEQ ID NO: GGGGSGGGGS (SEQ ID NO: 619), GGGGS (SEQ ID NO: 23), or GGGSEGGGSEGGGSE (SEQ ID NO: 1546), or any combination thereof.
[0639] 32. The antibody of any of the preceding embodiments, wherein the antibody is linked or associated with an effector molecule.
[0640] 33. The antibody of embodiment 32, wherein the effector molecule is a IL-2 mutein.
[0641] 34. The antibody of embodiment 33, wherein the IL-2 mutein comprises one or more mutations of E15Q, H16N, Q22 E, D84N, E95Q, Q126 E, N29S, Y31S, Y31H, K35R, T37A, K48 E, N71R, L53I, L56I, L80I, L118I, V69A, Q74P, N88D, N88R, C125A or C125S.
[0642] 35. The antibody of embodiments 33 or 34, wherein the IL-2 mutein comprises a L53I, L56I, L80I, or L118I mutation.
[0643] 36. The antibody of any one of embodiments 33-35, wherein the IL-2 mutein comprises a N88D mutation.
[0644] 37. The antibody of any one of embodiments 33-36, wherein the IL-2 mutein comprises a E15Q, H16N, Q22 E, D84N, E95Q, or Q126 E mutation.
[0645] 38. The antibody of embodiments 36 or 37, wherein the IL-2 mutein comprises a N29S, Y31S, Y51H, K35R, T37A, K48 E, V69A, N71R, Q74P, N88D, N88R, C125A, or C125S mutation.
[0646] 39. The antibody of any one of embodiments 33-38, wherein the IL-2 mutein is fused or linked to a Fc peptide.
[0647] 40. The antibody of embodiment 39, wherein the Fc peptide comprises a mutation at one or more of positions of L234, L235 and G237 according to the EU numbering system or L247, L248, and G250 according to the Kabat numbering system.
[0648] 41. The antibody of embodiment 39, wherein the Fc peptide comprises a L234A mutation, a L235A mutation, and/or a G237A mutation according to the EU numbering system.
[0649] 42. The antibody of embodiment 32, wherein the antibody linked to the effector molecule comprises a first polypeptide chain and a second a polypeptide chain that form a targeted effector polypeptide, wherein
   [0650] the first chain comprises a polypeptide having the formula of:
   [0651] V_{H}—H_{c}-Linker-C₁, wherein V_{H} is the heavy chain variable domain of the antibody of any one of embodiments 1-29; H_{c} is a heavy chain constant domain, such as a CH1-CH2-CH3 domain (SEQ ID NO: 44), the Linker is a glycine/serine linker, and C₁ is the IL-2 mutein fused or linked to a Fc protein, wherein the Fc protein is fused or linked at the N-terminus or the C-terminus of the IL-2 mutein; and
   [0652] the second chain comprises a polypeptide having the formula of V_{L}-L_{c}, wherein V_{L} is a light chain variable domain of the antibody of any one of embodiments 1-31, and the L c domain is a kappa light chain constant domain.
[0653] 43. A polypeptide having a formula of:
   [0654] Ab-ConstantDomain-LinkerA-IL2 Mutein-LinkerB-FcRegion,
   [0655] wherein the Ab is a heavy chain variable region of any one of embodiments 1-31;
   [0656] the ConstantDomain is an IgG constant domain, such as IgG₁ constant domain, IgG₂ constant domain, IgG₃ constant domain, or IgG₄;
   [0657] Linker A is a linker, such as those provided herein including a peptide linker,
   [0658] IL2 Mutein is an IL-2 mutein, such as those provided for herein;
   [0659] Linker B is a peptide linker; and
   [0660] FcRegion is a Fc region, such as those provided for herein.
[0661] 44. The polypeptide of embodiment 43, wherein, the heavy chain variable region is a heavy chain variable region as provided for in Table 9, Table 10, or Table 11, or any variant thereof
[0662] 45. The polypeptide of embodiment 43, wherein, the heavy chain variable region is a heavy chain variable region of Clone ID: 6, 75, or 79 of Table 7, MIAB126 or MIAB197 of Table 9, MIAB204 of Table 11, or any variant thereof.
[0663] 46. The polypeptide of embodiment 43, wherein the heavy chain variable comprises the CDRs of the heavy domain of 6, 75, or 79 of Table 7, MIAB126 or MIAB197 of Table 9, MIAB204 of Table 11, or any variant thereof
[0664] 47. The polypeptide of embodiment 43, wherein heavy chain variable region comprises a sequence of SEQ ID NO: 591, SEQ ID NO: 880, or SEQ ID NO: 1387, or any variant thereof
[0665] 48. The polypeptide of embodiment 43, wherein the heavy chain variable region comprises:
   [0666] a first CDR of SEQ ID NO: 359, a second CDR of SEQ ID NO: 170, and a third CDR of SEQ ID NO: 360, or any variant thereof;
   [0667] a first CDR of SEQ ID NO: 359, a second CDR of SEQ ID NO: 170, and a third CDR of SEQ ID NO: 1431, or any variant thereof;
   [0668] a first CDR of SEQ ID NO: 135, a second CDR of SEQ ID NO: 381, and a third CDR of SEQ ID NO: 1342, or any variant thereof;
   [0669] a first CDR of SEQ ID NO: 1499, a second CDR of SEQ ID NO: 1506, and a third CDR of SEQ ID NO: 1507, or any variant thereof;
   [0670] a first CDR of SEQ ID NO: 1499, a second CDR of SEQ ID NO: 1506, and a third CDR of SEQ ID NO: 1531, or any variant thereof; or
   [0671] a first CDR of SEQ ID NO: 1499, a second CDR of SEQ ID NO: 1506, and a third CDR of SEQ ID NO: 1532, or any variant thereof
[0672] 49. The polypeptide of any one of embodiments 41-46, wherein LinkerA comprises a sequence of (GGGGS)ₙ (SEQ ID NO: 1550), (GGGGA)ₙ (SEQ ID NO: 1551), (GGGSE)ₙ (SEQ ID NO: 1547), or a mixture thereof, wherein each n is independently 1-10.
[0673] 50. The polypeptide of embodiment 43, wherein the IL-2 mutein comprises a sequence of any one of SEQ ID NOs: 32, 33, 34, 35, 36, 37, 38, 39, 40, or 41.
[0674] 51. The polypeptide of any one of embodiments 43-50, wherein the IL-2 mutein comprises a T3A mutation.
[0675] 52. The polypeptide of any one of embodiments 43-51, wherein Linker B is a linker, such as a peptide linker that comprises a sequence of (GGGGS)ₙ (SEQ ID NO: 1550), (GGGGA)ₙ (SEQ ID NO: 1551), (GGGSE)ₙ (SEQ ID NO: 1547), or a mixture thereof, wherein each n is independently 1-10.
[0676] 53. The polypeptide of any one of embodiments 43-52, wherein the FcRegion comprises a peptide of having a sequence of SEQ ID NO: 21, or SEQ ID NO: 44.
[0677] 54. The polypeptide of any one of embodiments 43-53, wherein the polypeptide comprises a second polypeptide having a formula of VL-ConstantDomainLight, wherein VL is a light chain variable domain of the antibody of any one of embodiments 1-29 and the ConstantDomainLight is a IgG light chain constant domain.
[0678] 55. The polypeptide of embodiment 54, wherein VL comprises a sequence of SEQ ID NO: 592, SEQ ID NO: 1363, or a VL sequence as provided for in Table 9, Table 10, Table 11, Table 14, or Table 15, or any variant thereof.
[0679] 56. The polypeptide of embodiment 54, wherein the VL comprises:
   [0680] a first CDR of SEQ ID NO: 361, a second CDR of SEQ ID NO: 362, and a third CDR of SEQ ID NO: 363;
   [0681] a first CDR of SEQ ID NO: 1408, a second CDR of SEQ ID NO: 362, and a third CDR of SEQ ID NO: 363; or
   [0682] a first CDR of SEQ ID NO: 383, a second CDR of SEQ ID NO: 241, and a third CDR of SEQ ID NO: 652.
[0683] 57. The polypeptide of any one of embodiments 43-56, wherein the ConstantDomainLight comprises a sequence of SEQ ID NO: 45.
[0684] 58. A polypeptide comprising the formula of IL2 Mutein-LinkerA-FcRegion-LinkerB-Ab, wherein:
   [0685] IL2 Mutein is any IL-2 mutein provided for herein;
   [0686] LinkerA and Linker B are, each, independently, a linker as provided herein;
   [0687] the FcRegion is Fc peptide, such as provided herein; and
   [0688] the Ab is a tissue targeting moiety, such as those provided herein.
[0689] 59. The polypeptide of embodiment 58, wherein the Ab is an antibody that binds to MAdCAM or another cell surface target as provided herein.
[0690] 60. The polypeptide of embodiment 59, wherein the antibody that binds to MAdCAM is an antibody of any one of embodiments 1-31.
[0691] 61. The polypeptide of embodiment 60, wherein the antibody is in a scFV format.
[0692] 62. The polypeptide of embodiment 61, wherein the antibody in scFV format is an antibody as provided in Table 11, Table 14, Table 15, or any variant thereof
[0693] 63. The polypeptide of embodiment 60, wherein the antibody that binds to MAdCAM comprises CDRs as set forth in Table 9, Table 14, or Table 15, or any variant thereof
[0694] 64. The antibody of embodiment 63, wherein the effector molecule is an antibody that binds to PD-1.
[0695] 65. The antibody of embodiment 64, wherein the antibody that binds to PD-1 is a PD-1 agonist.
[0696] 66. The antibody of embodiment 64, wherein the PD-1 antibody is in a Fab format.
[0697] 67. The antibody of embodiment 64, wherein the PD-1 antibody is an antibody as provided in Table 12, or Table 13.
[0698] 68. The antibody of embodiment 64, wherein the antibody that binds to PD-1 comprises CDRs as set forth in Table 13, or any combination thereof.
[0699] 69. A polypeptide comprising a MAdCAM targeting moiety that binds to a target cell expressing MAdCAM and an effector binding/modulating moiety,
   [0700] wherein the MAdCAM targeting moiety is an antibody of any one of embodiments 1-31,
   [0701] wherein the effector binding/modulating moiety is a IL-2 mutein polypeptide (IL-2 mutein), wherein the IL-2 mutein comprises the sequence of SEQ ID NO: 41.
[0702] 70. The polypeptide of embodiment 69, wherein the IL-2 mutein binds to a receptor expressed by an immune cell.
[0703] 71. The polypeptide of embodiment 69, wherein the compound has the formula from N-terminus to C-terminus:
   [0704] R1—Linker Region A—R2 or R3—Linker Region B—R4, wherein,
   [0705] R1, R2, R3, and R4, each independently comprises the effector binding/modulating moiety, the targeting moiety, or is absent, provided that at least one of R1 and R2 is not absent, and at least one of R3 and R4 is not absent.
[0706] 72. The polypeptide of embodiment 71, wherein the polypeptide having the formula of R1— Linker Region A—R2 and the polypeptide having the formula of R3—Linker Region B—R4 interact with one another to form a polypeptide complex.
[0707] 73. The polypeptide of embodiment 71, wherein the polypeptide having the formula of R1— Linker Region A—R2 and the polypeptide having the formula of R3—Linker Region B—R4 do not interact with one another to form a polypeptide complex.
[0708] 74. The polypeptide of embodiment 71, wherein one or both of Linker Region A and Linker Region B comprises an Fc region.
[0709] 75. The polypeptide of embodiment 71, wherein one of R1 and R2 is the IL-mutein and one of R1 and R2 is an anti-MAdCAM antibody of any one of embodiments 1-31.
[0710] 76. The polypeptide of embodiment 71, wherein R1 is the IL-mutein and R2 is an anti-MAdCAM antibody of any one of embodiments 1-31.
[0711] 77. The polypeptide of embodiment 71, wherein one of R1 is anti-MAdCAM antibody of any one of embodiments 1-31 and one R2 is an anti-PD-1 antibody.
[0712] 78. The polypeptide of embodiment 71, wherein one of R3 and R4 is the IL-2 mutein and one of R3 and R4 is an anti-MAdCAM antibody of any one of embodiments 1-31.
[0713] 79. The polypeptide of embodiment 71, wherein R3 is the IL-2 mutein and R4 is an anti-MAdCAM antibody.
[0714] 80. The polypeptide of embodiment 71, wherein R3 is an anti-MAdCAM antibody of any one of embodiments 1-29 and one R4 is the IL-2 mutein.
[0715] 81. The polypeptide of any of embodiments 71-80, wherein the linker is absent.
[0716] 82. The polypeptide of any of embodiments 71-80, wherein the linker is a Fc region.
[0717] 83. The polypeptide of any of embodiments 71-80, wherein the linker is a glycine/serine linker.
[0718] 84. The polypeptide of embodiment 83, wherein the linker is

(SEQ ID NO: 22)
GGGGSGGGGSGGGGSGGGGS,
(SEQ ID NO: 30)
GGGGGGGGSGGGGS,
(SEQ ID NO: 619)
GGGGSGGGGS,
(SEQ ID NO: 23)
GGGGS,
or
(SEQ ID NO: 1546)
GGGSEGGGSEGGGSE.

[0719] 85. The polypeptide of embodiment 69, wherein the IL-2 mutein comprises a IL-2 sequence of SEQ ID NO: 6, wherein peptide comprises a mutation at a position that corresponds to position 53, 56, 80, or 118 of SEQ ID NO: 6.
[0720] 86. The polypeptide of any one of embodiments 69-85, wherein the IL-2 mutein comprises a IL-2 sequence of SEQ ID NO: 6, wherein peptide comprises a mutation at a position that corresponds to position 53, 56, 80, or 118 of SEQ ID NO: 6.
[0721] 87. The polypeptide of embodiment 86, wherein the mutation is a L to I mutation at position 53, 56, 80, or 118.
[0722] 88. The polypeptide of embodiment 87, wherein the mutation is a L to I mutation at position 53, 56, 80, or 118.
[0723] 89. The polypeptide of embodiment 69-88, further comprising a mutation at one or more positions of 29, 31, 35, 37, 48, 69, 71, 74, 88, and 125 in SEQ ID NO: 6.
[0724] 90. The polypeptide of any one of embodiments 69-89, wherein the mutein further comprises a mutation at one or more of positions E15, H16, Q22, D84, E95, or Q126 or 1, 2, 3, 4, 5, or each of positions E15, H16, Q22, D84, E95, or Q126 is wild-type.
[0725] 91. The polypeptide of any one of embodiments 69-90, wherein the mutation in the mutein is one or more of E15Q, H16N, Q22 E, D84N, E95Q, or Q126 E.
[0726] 92. The polypeptide of any one of embodiments 69-91, wherein the mutein comprises a V69A mutation.
[0727] 93. The polypeptide of any one of embodiments 69-92, wherein the mutein comprises a Q74P mutation.
[0728] 94. The polypeptide of any one of embodiments 69-93, wherein the mutein comprises a N88D or a N88R mutation.
[0729] 95. The polypeptide of any one of embodiments 69-94, wherein the mutein comprises a C125A or C125S mutation.
[0730] 96. The polypeptide of any one of embodiments 69-95, wherein the IL-2 mutein is fused or linked to a Fc peptide, such as a protein comprising a sequence of SEQ ID NO: 59; or SEQ ID NO: 44, 23, and 41.
[0731] 97. The polypeptide of embodiment 96, wherein the Fc peptide comprises a mutation at one or more of positions of L234, L247, L235, L248, G237, and G250.
[0732] 98. The polypeptide of embodiment 96, wherein the mutation is L to A or G to A mutation.
[0733] 99. The polypeptide of embodiment 96, wherein the Fc peptide comprises L247A, L248A, and G250A mutations.
[0734] 100. The polypeptide of embodiment 99, wherein the Fc peptide comprises a L234A mutation, a L235A mutation, and/or a G237A mutation.
[0735] 101. The polypeptide of embodiment 69, wherein the polypeptide comprises a first chain and a second chain that form the polypeptide, wherein
   [0736] the first chain comprises:
   [0737] V_{H}—H_{c}-Linker-C1, wherein V_{H} is a variable heavy domain that binds to MAdCAM expressed on a cell with a VL domain of the second chain; H_{c} is a heavy chain of antibody comprising CH1-CH2-CH3 domain, the Linker is a glycine/serine linker, and C₁ is a IL-2 mutein fused to a Fc protein in either the N-terminal or C-terminal orientation; and
   [0738] the second chain comprises:
   [0739] V_{L}-L_{c}, wherein V_{L} is a variable light chain domain that binds to MAdCAM expressed on a cell with the V_{H} domain of the first chain, and the Lc domain is a light chain CK domain,
   [0740] Wherein VL and VH comprises a sequence of an antibody of any one of embodiments 1-31.
[0741] 102. The polypeptide of embodiment 101, wherein the IL-2 mutein comprises a mutation at a position that corresponds to position 53, 56, 80, or 118 of SEQ ID NO: 6.
[0742] 103. The polypeptide of embodiment 102, wherein the mutation is a L to I mutation at position 53, 56, 80, or 118.
[0743] 104. The polypeptide of embodiment 101, wherein the mutein further comprises a mutation at a position that corresponds to position 69, 75, 88, or 125, or any combination thereof.
[0744] 105. The polypeptide of embodiment 101, comprises a mutation selected from the group consisting of: at one of L531, L561, L80I, and L118I and the mutations of V69A, Q74P, N88D or N88R, and optionally C125A or C125S.
[0745] 106. The polypeptide of embodiment 105, wherein the IL-2 mutein comprises a L531 mutation.
[0746] 107. The polypeptide of embodiment 105, wherein the IL-2 mutein comprises a L561 mutation.
[0747] 108. The polypeptide of embodiment 105, wherein the IL-2 mutein comprises a L80I mutation.
[0748] 109. The polypeptide of embodiment 105, wherein the IL-2 mutein comprises a L118I mutation.
[0749] 110. The polypeptide of any one of embodiments 105-109, wherein the IL-2 mutein comprises a T3A mutation.
[0750] 111. The polypeptide of embodiment 102 or 105, wherein the IL-2 mutein does not comprises any other mutations.
[0751] 112. The polypeptide of embodiment 105, wherein the Fc protein comprises L247A, L248A, and G250A mutations or a L234A mutation, a L235A mutation, and/or a G237A mutation according to KABAT numbering.
[0752] 113. The polypeptide of embodiment 105, wherein the Linker comprises a sequence of

(SEQ ID NO: 30)
GGGGSGGGGSGGGGS,
(SEQ ID NO: 22)
GGGGSGGGGSGGGGSGGGGS,
or
(SEQ ID NO: 1546)
GGGSEGGGSEGGGSE.

[0753] 114. The polypeptide of any one of embodiments 1-113, wherein the polypeptide comprises a Fc peptide comprising a sequence described herein.
[0754] 115. A method of treating a subject with inflammatory bowel disease, the method comprising administering a polypeptide or antibody of any of embodiments 1-114 to the subject to treat the inflammatory bowel disease.
[0755] 116. The method of embodiment 115, wherein the subject with inflammatory bowel disease has Crohn's disease.
[0756] 117. The method of embodiment 115, wherein the subject with inflammatory bowel disease has ulcerative colitis.
[0757] 118. A method of treating a subject with auto-immune hepatitis, the method comprising administering a polypeptide or antibody of any of embodiments 1-114 to the subject to treat the auto-immune hepatitis.
[0758] 119. A method of treating primary sclerosing cholangitis the method comprising administering a polypeptide or antibody of any of embodiments 1-114 to the subject to treat the primary sclerosing cholangitis.
[0759] 120. A method of treating Type 1 diabetes the method comprising administering a polypeptide or antibody of any of embodiments 1-114 to the subject to treat the Type 1 diabetes.
[0760] 121. A method of treating a transplant subject comprising administering a therapeutically effective amount of a polypeptide or antibody of any of embodiments 1-114 to the subject, thereby treating a transplant (recipient) subject.
[0761] 122. A method of treating GVHD in a subject having a transplanted a donor tissue comprising administering a therapeutically effective amount of a polypeptide or antibody of any of embodiments 1-114 to the subject.
[0762] 123. A method of treating a subject having, or at risk, or elevated risk, for having, an autoimmune disorder, comprising administering a therapeutically effective amount of a polypeptide or antibody of any of embodiments 1-114, thereby treating the subject.
[0763] 124. An isolated nucleic acid encoding a polypeptide, an antibody, or antigen binding fragment thereof, of any of embodiments 1-114.
[0764] 125. An expression vector comprising the nucleic acid of embodiment 124.
[0765] 126. A host cell comprising the isolated nucleic acid of embodiment 124 or the vector of embodiment 125.
[0766] 127. A method of making a polypeptide or antibody of any of embodiments 1-114 comprising culturing a host cell of embodiment 126 to make the polypeptide or antibody of any of embodiments 1-114.
[0767] 128. A method of producing an antibody or antigen binding fragment thereof of any one of embodiments 1-114 comprising (a) culturing a host cell comprising one or more nucleic acids encoding the antibody or antigen binding fragment thereof in a culture medium under conditions favorable for expression of the one or more nucleic acids and (b) optionally recovering the antibody or antigen binding fragment thereof from the culture medium.
[0768] 129. A method of making or producing a polypeptide, or an antibody, or antigen binding fragment thereof, comprising a heavy chain variable region and a light chain variable region, wherein:
   [0769] the heavy chain variable region comprises a variable heavy CDR1 (HCDR1) having at least 90% identity to the amino acid sequence of SEQ ID NO: 1499, a variable heavy CDR2 (HCDR2) having at least 90% identity to the amino acid sequence of SEQ ID NO: 1506, and variable heavy CDR3 (HCDR3) having at least 90% identity to the amino acid sequence of SEQ ID NO: 1507, 1531 or 1532; and
   [0770] the light chain variable region comprises a variable light CDR1 (LCDR1) having at least 90% identity to the amino acid sequence of SEQ ID NO: 1502, a variable light CDR2 (LCDR2) having at least 90% identity to the amino acid sequence of SEQ ID NO: 1497, and a variable light CDR3 (LCDR3) having at least 90% identity to the amino acid sequence of SEQ ID NO: 1498.
[0771] 130. A method of making or producing a polypeptide, or an antibody, or antigen binding fragment thereof, wherein the heavy chain variable region comprises an amino acid sequence of SEQ ID NOs: 1445, 1477, or 1480 and the light chain variable region comprises an amino acid of SEQ ID NO: 1367.
[0772] 131. A method of making or producing a polypeptide, or an antibody, or antigen binding fragment thereof, comprising a heavy chain variable region and a light chain variable region, wherein:
   [0773] the heavy chain variable region comprises a variable heavy CDR1 (HCDR1) having at least 90% identity to the amino acid sequence of SEQ ID NO: 1499, a variable heavy CDR2 (HCDR2) having at least 90% identity to the amino acid sequence of SEQ ID NO: 1506, and variable heavy CDR3 (HCDR3) having at least 90% identity to the amino acid sequence of SEQ ID NO: 1507, 1531 or 1532; and
   [0774] the light chain variable region comprises a variable light CDR1 (LCDR1) having at least 90% identity to the amino acid sequence of SEQ ID NO: 1502, a variable light CDR2 (LCDR2) having at least 90% identity to the amino acid sequence of SEQ ID NO: 1497, and a variable light CDR3 (LCDR3) having at least 90% identity to the amino acid sequence of SEQ ID NO: 1498,
   [0775] wherein the method comprises (a) culturing a host cell comprising one or more nucleic acids encoding the antibody or antigen binding fragment thereof in a culture medium under conditions favorable for expression of the one or more nucleic acids encoding:
   [0776] the heavy chain variable region comprising a variable heavy CDR1 (HCDR1) having at least 90% identity to the amino acid sequence of SEQ ID NO: 1499, a variable heavy CDR2 (HCDR2) having at least 90% identity to the amino acid sequence of SEQ ID NO: 1506, and variable heavy CDR3 (HCDR3) having at least 90% identity to the amino acid sequence of SEQ ID NO: 1507, 1531 or 1532; and
   [0777] the light chain variable region comprising a variable light CDR1 (LCDR1) having at least 90% identity to the amino acid sequence of SEQ ID NO: 1502, a variable light CDR2 (LCDR2) having at least 90% identity to the amino acid sequence of SEQ ID NO: 1497, and a variable light CDR3 (LCDR3) having at least 90% identity to the amino acid sequence of SEQ ID NO: 1498; and
   [0778] (b) optionally recovering the antibody or antigen binding fragment thereof from the culture medium.
[0779] 132. A method of making or producing a polypeptide, or an antibody, or antigen binding fragment thereof, wherein the heavy chain variable region comprises an amino acid sequence of SEQ ID NOs: 1445, 1477, or 1480 and the light chain variable region comprises an amino acid of SEQ ID NO: 1367, wherein the method comprises (a) culturing a host cell comprising one or more nucleic acids encoding the antibody or antigen binding fragment thereof in a culture medium under conditions favorable for expression of the one or more nucleic acids encoding: the heavy chain variable region comprising an amino acid sequence of SEQ ID NOs: 1445, 1477, or 1480 and the light chain variable region comprising an amino acid of SEQ ID NO: 1367; and (b) optionally recovering the antibody or antigen binding fragment thereof from the culture medium.
[0780] 133. A protein comprising a peptide or set of peptides as provided in Table 9, Table 10, Table 11, Table 12, Table 13, or Table 12.
[0781] 134. The protein of embodiment 130, wherein the protein comprises a set of sequences as set forth in a row of Table 9, Table 10, Table 11, Table 12, Table 13, or Table 12.
[0782] 135. A protein comprising:
   [0783] i) a peptide comprising a sequence of SEQ ID NOs: 359, 170, 360, 361, 362, and 363, or any variant of any of the foregoing;
   [0784] ii) a peptide comprising a sequence of SEQ ID NOs: 359, 170, and 360, or any variant of any of the foregoing;
   [0785] iii) a peptide comprising a sequence of SEQ ID NOs: 361, 362, and 363, or any variant of any of the foregoing;
   [0786] iv) a peptide comprising a sequence of SEQ ID NOs: 1387, 44, 23, 41, 1363, and 45, or any variant of any of the foregoing;
   [0787] v) a peptide comprising a sequence of SEQ ID NOs: 359, 170, 1431, 1408, 362, 363, or any variant of any of the foregoing;
   [0788] vi) a peptide comprising a sequence of SEQ ID NOs: 359, 170, 1431, or any variant of any of the foregoing;
   [0789] vii) a peptide comprising a sequence of SEQ ID NOs: 1408, 362, 363, or any variant of any of the foregoing;
   [0790] vii) a peptide comprising a sequence of SEQ ID NOs: 880, 44, 23, 41, 663, and 45, or any variant of any of the foregoing;
   [0791] ix) a peptide comprising a sequence of SEQ ID NOs: 135, 381, 1342, 383, 241, and 652, or any variant of any of the foregoing;
   [0792] x) a peptide comprising a sequence of SEQ ID NOs: 135, 381, and 1342, or any variant of any of the foregoing; or
   [0793] xi) a peptide comprising a sequence of SEQ ID NOs: 383, 241, and 652, or any variant of any of the foregoing.
[0794] 136. A pharmaceutical composition comprising a polypeptide, antibody, or a protein of any of embodiments 1-114 or 133-135 and a pharmaceutically acceptable carrier.
[0795] 137. A pharmaceutical composition comprising any peptide comprising a sequence as provided for herein.
[0796] 138. Use of a polypeptide or antibody of any of embodiments 1-114, or a pharmaceutical composition comprising the same, for the manufacture of a medicament for the treatment of inflammatory bowel disease.
[0797] 139. Use of a polypeptide or antibody of any of embodiments 1-114, or a pharmaceutical composition comprising the same, for the manufacture of a medicament for the treatment of inflammatory bowel disease, such as Crohn's disease, or ulcerative colitis.
[0798] 140. Use of a polypeptide or antibody of any of embodiments 1-114, or a pharmaceutical composition comprising the same, for the manufacture of a medicament for the treatment of Crohn's disease, or ulcerative colitis.
[0799] 141. Use of a polypeptide or antibody of any of embodiments 1-114, or a pharmaceutical composition comprising the same, for the manufacture of a medicament for the treatment of an auto-immune hepatitis, a primary sclerosing cholangitis, a Type 1 diabetes, a transplant, a GVHD, an elevated risk, or a risk, for having, an autoimmune disorder.
[0800] 142. Use of a polypeptide or antibody of any of embodiments 1-114, or a pharmaceutical composition comprising the same, for the treatment of inflammatory bowel disease.
[0801] 143. Use of a polypeptide or antibody of any of embodiments 1-114, or a pharmaceutical composition comprising the same, for the treatment of an auto-immune hepatitis, a primary sclerosing cholangitis, a Type 1 diabetes, a transplant, a GVHD, an elevated risk, or a risk, for having, an autoimmune disorder.

[0802] The following examples are illustrative, but not limiting, of the compounds, compositions and methods described herein. Other suitable modifications and adaptations known to those skilled in the art are within the scope of the following embodiments.

### EXAMPLES

[0803] Non limiting examples of therapeutics, compounds, molecules, antibodies, compositions of matter, and examples may be found in PCT Application No. PCT/US2020/033707, which is hereby incorporated by reference in its entirety.

### Example 1. MAdCAM Molecule Variants with Disrupted Poly Y Patch do not Show Non Specific Binding to DNA and Insulin

[0804] Non-specific DNA and Insulin binding is predictive of poor pharmacokinetics (PK). An immunosorbent plate was coated with dsDNA at a concentration of 1 μg/mL or Insulin at 5 μg/mL in PBS pH 7.4, 75 ul/well, and incubated overnight at 4° C. Wells were washed with PBS pH 7.4 containing 0.05% Tween-20 (wash buffer) three times, and then blocked with 200 ul/well 1% BSA in PBS pH 7.4 (block buffer) for two hours at room temperature. After three washes with wash buffer, TAs and controls Lenzilumab and Elotuzumab were diluted to 100 nM in PBS containing 1% BSA and 0.05% Tween-20 (assay buffer). The diluted material was added to the DNA/insulin coated plate at 75 ul/well for 1 hour at room temperature. After three washes with wash buffer, a donkey anti-human FcY HRP conjugated polyclonal antibody, diluted to 1:5000 in assay buffer, was added to the plate at 75 ul/well for 1 hr at room temperature. After three washes with wash buffer and three washes with wash buffer (with no tween-20), the assay was developed with TMB, and stopped with 1N HCL. OD 450 nm was measured. The experiment included appropriate controls for non-specific binding of test articles to the plate/block in the absence of DNA or insulin. PRNT1 showed dsDNA polyreactivity score of 45.64, and Insulin polyreactivity score of 6.21; MIAB128 showed dsDNA polyreactivity score of 33.01, and Insulin polyreactivity score of 2.62; MIAB129 showed dsDNA polyreactivity score of 3.51, and Insulin polyreactivity score of 2.43; MIAB130 showed dsDNA polyreactivity score of 29.66, and Insulin polyreactivity score of 3.26; MIAB131 showed dsDNA polyreactivity score of 13.49, and Insulin polyreactivity score of 8.00; MIAB133 showed dsDNA polyreactivity score of 44.80, and Insulin polyreactivity score of 13.16; MIAB134 showed dsDNA polyreactivity score of 45.96, and Insulin polyreactivity score of 25.53; MIAB136 showed dsDNA polyreactivity score of 51.85, and Insulin polyreactivity score of 75.37; MIAB137 showed dsDNA polyreactivity score of 43.44, and Insulin polyreactivity score of 67.33; MIAB139 showed dsDNA polyreactivity score of 1.09, and Insulin polyreactivity score of 2.08; MIAB141 showed dsDNA polyreactivity score of 33.26, and Insulin polyreactivity score of 4.18; MIAB144 showed dsDNA polyreactivity score of 47.18, and Insulin polyreactivity score of 5.07; Elotuzumab control showed dsDNA polyreactivity score of 1, and Insulin polyreactivity score of 1; and Lenzilumab control showed dsDNA polyreactivity score of 52.42, and Insulin polyreactivity score of 1.52. No non-specific binding to DNA and insulin was seen with MIAB129, MIAB139, and MIAB141. MIAB129, MIAB139, and MIAB141 are not polyreactive.

### Example 2. MAdCAM Molecule Variants with the A34N Substitution in LCDR1 do not Show Non Specific Binding to DNA and Insulin

[0805] Non-specific DNA and Insulin binding is predictive of poor pharmacokinetics (PK). An immunosorbent plate was coated with dsDNA at a concentration of 1 μg/mL or Insulin at 5 μg/mL in PBS pH 7.4, 75 ul/well, and incubated overnight at 4° C. Wells were washed with PBS pH 7.4 containing 0.05% Tween-20 (wash buffer) three times, and then blocked with 200 ul/well 1% BSA in PBS pH 7.4 (block buffer) for two hours at room temperature. After three washes with wash buffer, TAs and controls Lenzilumab and Elotuzumab were diluted to 100 nM in PBS containing 1% BSA and 0.05% Tween-20 (assay buffer). The diluted material was added to the DNA/insulin coated plate at 75 ul/well for 1 hour at room temperature. After three washes with wash buffer, a donkey anti-human FcY HRP conjugated polyclonal antibody, diluted to 1:5000 in assay buffer, was added to the plate at 75 ul/well for 1 hr at room temperature. After three washes with wash buffer and three washes with wash buffer (with no tween-20), the assay was developed with TMB, and stopped with 1N HCL. OD 450 nm was measured. The experiment included appropriate controls for non-specific binding of test articles to the plate/block in the absence of DNA or insulin. MIAB145 showed dsDNA polyreactivity score of 43.11, and Insulin polyreactivity score of 4.58; MIAB146 showed dsDNA polyreactivity score of 24.57, and Insulin polyreactivity score of 2.61; MIAB147 showed dsDNA polyreactivity score of 8.36, and Insulin polyreactivity score of 3.81; MIAB148 showed dsDNA polyreactivity score of 3.53, and Insulin polyreactivity score of 3.63; MIAB149 showed dsDNA polyreactivity score of 27.86, and Insulin polyreactivity score of 3.53; MIAB150 showed dsDNA polyreactivity score of 9.66, and Insulin polyreactivity score of 3.74; MIAB151 showed dsDNA polyreactivity score of 2.89, and Insulin polyreactivity score of 3.63; MIAB152 showed dsDNA polyreactivity score of 7.01, and Insulin polyreactivity score of 2.83; MIAB153 showed dsDNA polyreactivity score of 1.52, and Insulin polyreactivity score of 2.46; MIAB154 showed dsDNA polyreactivity score of 8.25, and Insulin polyreactivity score of 61.91; MIAB155 showed dsDNA polyreactivity score of 1.62, and Insulin polyreactivity score of 1.99; MIAB156 showed dsDNA polyreactivity score of 4.70, and Insulin polyreactivity score of 45.25; MIAB157 showed dsDNA polyreactivity score of 6.63, and Insulin polyreactivity score of 3.99; MIAB158 showed dsDNA polyreactivity score of 1.67, and Insulin polyreactivity score of 2.67; PRNT1 showed dsDNA polyreactivity score of 38.82, and Insulin polyreactivity score of 5.02; MIAB141 showed dsDNA polyreactivity score of 1.77, and Insulin polyreactivity score of 3.60; Elotuzumab control showed dsDNA polyreactivity score of 0.95, and Insulin polyreactivity score of 1.01; and Lenzilumab control showed dsDNA polyreactivity score of 38.04, and Insulin polyreactivity score of 7.87. No non-specific binding to DNA and insulin was seen with MIAB148, MIAB151, MIAB153, MIAB155, MIAB158 and MIAB141. MIAB148, MIAB151, MIAB153, MIAB155, MIAB158 and MIAB141 are not polyreactive.

### Example 3. MAdCAM Molecule Variants with the A34N Substitution in LCDR1 Bind Human MAdCAM

[0806] Anti-human Fc biosensors were equilibrated in assay buffer (1% BSA in 1×PBS with Tween-20) for 10 minutes before the experiment was set-up. Test articles were diluted to ug/mL in assay buffer and 200 uL pipetted to 96 well plate. Human MAdCAM was titrated down, two-fold dilutions (starting at 600 nM as the highest concentration, 7-point dilution). Experiment was run using data acquisition software version 10.0 for OCTET96 RED. Test articles were captured using anti-human Fc biosensors for 180 s. Biosensors loaded with test articles were then equilibrated in assay buffer for 120 s. Association was performed in wells with huMAdCAM for 180 seconds. Dissociation was performed in wells with assay buffer for 180 s. Kinetic parameters (kon and kdis) and dissociation constant (KD) were calculated from a 1:1 global fit model using the data analysis software of the Octet96 RED software version 10. MIAB148 showed Kd (M) of 2.69 E−06, Kon (1/ms) of 1.17 E+05, and Kdis (1/s) of 3.14 E−01; MIAB151 showed Kd of 2.96 E−06, Kon of 9.87 E+04, and Kdis of 2.92 E−01; MIAB153 showed Kd of 8.36 E−06, Kon of 6.48 E+04, and Kdis of 5.43 E−01; and PRNT1 showed Kd of 1.84 E−08, Kon of 5.83 E+05, and Kdis of 1.07 E−02. MIAB148, MIAB151, and MIAB153 binds human MAdCAM with lower affinity than the parent PRNT1 molecule.

### Example 4. MAdCAM Molecule Variants with Y105I or Y105W and A34N Mutations in the VH do not Show Non Specific Binding to DNA and Insulin

[0807] Non-specific DNA and Insulin binding is predictive of poor pharmacokinetics (PK). An immunosorbent plate was coated with dsDNA at a concentration of 1 μg/mL or Insulin at 5 μg/mL in PBS pH 7.4, 75 ul/well, and incubated overnight at 4° C. Wells were washed with PBS pH 7.4 containing 0.05% Tween-20 (wash buffer) three times, and then blocked with 200 ul/well 1% BSA in PBS pH 7.4 (block buffer) for two hours at room temperature. After three washes with wash buffer, TAs and controls Lenzilumab and Elotuzumab were diluted to 100 nM in PBS containing 1% BSA and 0.05% Tween-20 (assay buffer). The diluted material was added to the DNA/insulin coated plate at 75 ul/well for 1 hour at room temperature. After three washes with wash buffer, a donkey anti-human FcY HRP conjugated polyclonal antibody, diluted to 1:5000 in assay buffer, was added to the plate at 75 ul/well for 1 hr at room temperature. After three washes with wash buffer and three washes with wash buffer (with no tween-20), the assay was developed with TMB, and stopped with 1N HCL. OD 450 nm was measured. The experiment included appropriate controls for non-specific binding of test articles to the plate/block in the absence of DNA or insulin. MIAB159 showed dsDNA polyreactivity score of 9.58, and Insulin polyreactivity score of 4.66; MIAB160 showed dsDNA polyreactivity score of 42.95, and Insulin polyreactivity score of 17.80; MIAB161 showed dsDNA polyreactivity score of 25.87, and Insulin polyreactivity score of 5.00; MIAB162 showed dsDNA polyreactivity score of 21.75, and Insulin polyreactivity score of 5.31; MIAB163 showed dsDNA polyreactivity score of 28.56, and Insulin polyreactivity score of 18.53; MIAB164 showed dsDNA polyreactivity score of 25.46, and Insulin polyreactivity score of 7.07; MIAB165 showed dsDNA polyreactivity score of 19.42, and Insulin polyreactivity score of 9.53; MIAB166 showed dsDNA polyreactivity score of 37.98, and Insulin polyreactivity score of 7.89; MIAB167 showed dsDNA polyreactivity score of 26.28, and Insulin polyreactivity score of 29.56; MIAB168 showed dsDNA polyreactivity score of 7.75, and Insulin polyreactivity score of 8.35; MIAB169 showed dsDNA polyreactivity score of 3.34, and Insulin polyreactivity score of 5.59; MIAB170 showed dsDNA polyreactivity score of 2.05, and Insulin polyreactivity score of 4.73; MIAB172 showed dsDNA polyreactivity score of 26.63, and Insulin polyreactivity score of 3.79; MIAB173 showed dsDNA polyreactivity score of 29.82, and Insulin polyreactivity score of 7.10; PRNT1 showed dsDNA polyreactivity score of 34.37, and Insulin polyreactivity score of 6.91; Elotuzumab control showed dsDNA polyreactivity score of 1.05, and Insulin polyreactivity score of 1.25; and Lenzilumab control showed dsDNA polyreactivity score of 44.96, and Insulin polyreactivity score of 21.31. No non-specific binding to DNA and insulin was seen with MIAB169 and MIAB170. MIAB169 and MIAB170 are not polyreactive.

### Example 5. MAdCAM Molecule Variants with the Y105I Substitution Bind Human MAdCAM

[0808] Anti-human Fc biosensors were equilibrated in assay buffer (1% BSA in 1×PBS with Tween-20) for 10 minutes before the experiment was set-up. Test articles were diluted to ug/mL in assay buffer and 200 uL pipetted to 96 well plate. Human MAdCAM was titrated down, two-fold dilutions (starting at 600 nM as the highest concentration, 7-point dilution). Experiment was run using data acquisition software version 10.0 for OCTET96 RED. Test articles were captured using anti-human Fc biosensors for 180 s. Biosensors loaded with test articles were then equilibrated in assay buffer for 120 s. Association was performed in wells with huMAdCAM for 180 seconds. Dissociation was performed in wells with assay buffer for 180 s. Kinetic parameters (kon and kdis) and dissociation constant (KD) were calculated from a 1:1 global fit model using the data analysis software of the Octet96 RED software version 10. PRNT1 showed Kd (nM) of 26.6, Kon (1/ms) of 4.16 E+05, and Kdis (1/s) of 1.11 E−02; MIAB169 showed Kd of 266, Kon of 2.78 E+05, and Kdis of 7.38 E−02; and MIAB170 showed no binding at 1 μM human MAdCAM tested. MIAB169 binds to human MAdCAM at 10 fold lower affinity than parent PRNT1.

### Example 6. MAdCAM Molecule Variants with the Y105I Substitution Bind Human and Cyno MAdCAM

[0809] Anti-human Fc biosensors were equilibrated in assay buffer (1% BSA in 1×PBS with Tween-20) for 10 minutes before the experiment was set-up. Test articles were diluted to ug/mL in assay buffer and 200 uL pipetted to 96 well plate. Human MAdCAM was titrated down, two-fold dilutions (starting at 600 nM as the highest concentration, 7-point dilution). Experiment was run using data acquisition software version 10.0 for OCTET96 RED. Test articles were captured using anti-human Fc biosensors for 180 s. Biosensors loaded with test articles were then equilibriated in assay buffer for 120 s. Association was performed in wells with huMAdCAM for 180 seconds. Dissociation was performed in wells with assay buffer for 180 s. Kinetic parameters (kon and kdis) and dissociation constant (KD) were calculated from a 1:1 global fit model using the data analysis software of the Octet96 RED software version 10. PRNT1 showed Kd (nM) of 24 in human, Kd of 13 in cyno, and biphasic Kd in mouse; MIAB169 showed Kd of 340 in human, Kd of 153 in cyno, and biphasic Kd in mouse. MIAB169 showed lower affinity to human and cyno MAdCAM than parent PRNT1.

### Example 7. MAdCAM Molecule Variants with the Y105I Mutation do not Show Non Specific Binding to DNA and Insulin Irrespective of Expression Host

[0810] An immunosorbent plate was coated with dsDNA at a concentration of 1 μg/mL or Insulin at 5 μg/mL in PBS pH 7.4, 75 ul/well, and incubated overnight at 4° C. Wells were washed with PBS pH 7.4 containing 0.05% Tween-20 (wash buffer) three times, and then blocked with 200 ul/well 1% BSA in PBS pH 7.4 (block buffer) for two hours at room temperature. After three washes with wash buffer, TAs and controls Lenzilumab and Elotuzumab were diluted to 100 nM in PBS containing 1% BSA and 0.05% Tween-20 (assay buffer). The diluted material was added to the DNA/insulin coated plate at 75 ul/well for 1 hour at room temperature. After three washes with wash buffer, a donkey anti-human FcY HRP conjugated polyclonal antibody, diluted to 1:5000 in assay buffer, was added to the plate at 75 ul/well for 1 hr at room temperature. After three washes with wash buffer and three washes with wash buffer (with no tween-20), the assay was developed with TMB, and stopped with 1N HCL. OD 450 nm was measured. The experiment included appropriate controls for non-specific binding of test articles to the plate/block in the absence of DNA or insulin. MIAB169-CHO showed dsDNA polyreactivity score of 1.65, and Insulin polyreactivity score of 3.38; MIAB169-HEK showed dsDNA polyreactivity score of 3.36, and Insulin polyreactivity score of 6.37; Elotuzumab control showed dsDNA polyreactivity score of 1.16, and Insulin polyreactivity score of 3.43; and Lenzilumab control showed dsDNA polyreactivity score of 49.51, and Insulin polyreactivity score of 69.23. No non-specific binding to DNA and insulin was seen with MIAB169 expressed in CHO or HEK cells.

### Example 8. MAdCAM Germlined Mutants Bind Human MAdCAM

[0811] Anti-human Fc biosensors were equilibriated in assay buffer (1% BSA in 1×PBS with Tween-20) for 10 minutes before the experiment was set-up. Test articles were diluted to ug/mL in assay buffer and 200 uL pipetted to 96 well plate. Human MAdCAM was titrated down, two-fold dilutions (starting at 600 nM as the highest concentration, 7-point dilution). Experiment was run using data acquisition software version 10.0 for OCTET96 RED. Test articles were captured using anti-human Fc biosensors for 180 s. Biosensors loaded with test articles were then equilibriated in assay buffer for 120 s. Association was performed in wells with huMAdCAM for 180 seconds. Dissociation was performed in wells with assay buffer for 180 s. Kinetic parameters (kon and kdis) and dissociation constant (KD) were calculated from a 1:1 global fit model using the data analysis software of the Octet96 RED software version 10. PRNT1 showed Kd (nM) of 14, Kon (1/ms) of 6.83 E+05, and Kdis (1/s) of 9.55 E−03; MIAB137 (HCDR2 germlined) showed Kd (nM) of 203, Kon (1/ms) of 4.04 E+05, and Kdis (1/s) of 8.2 E−02; MIAB136 (HCDR1 germlined), MIAB141 (LCDR1 germlined), and MIAB141 (LCDR3 germlined) showed no binding to 150 nM human MAdCAM. MIAB137 has a reduced binding affinity to human MAdCAM.

[0812] In a separate experiment PRNT1 showed Kd (nM) of 26.5, Kon (1/Ins) of 4.29 E+05, and Kdis (Vs) of 1.14 E−02; MIAB145-001 (VK: V29I) showed Kd (nM) of 22.2, Kon (1/ms) of 4.05 E+05, and Kdis (1/s) of 8.97 E−03; MIAB146-001 (VK: R31S) showed Kd (nM) of 43.8, Kon (1/ms) of 4.49 E+05, and Kdis (1/s) of 1.97 E−02; MIAB149-001 (VK: V29I) showed Kd (nM) of 68.8, Kon (1/ms) of 3.76 E+05, and Kdis (1/s) of 2.59 E−02; and MIAB147-001 (VK: S32Y) showed no binding to 200 nM human MAdCAM. MIAB146 and MIAB149 have reduced binding affinity to human MAdCAM.

[0813] In another experiment PRNT1 showed Kd (nM) of 21.2, Kon (1/ms) of 3.85 E+05, and Kdis (1/s) of 8.16 E−03; MIAB133-001 (VH: D31S) showed Kd (nM) of 20.00, Kon (1/ms) of and Kdis (1/s) of 1.13 E−02; MIAB174-001 (VH: HCDR1: F32Y) showed Kd (nM) of 21.8, Kon (1/ms) of 4.45 E+05, and Kdis (1/s) of 9.69 E−03; MIAB175-001 (VH: HCDR1: D31S, F32Y) showed Kd (nM) of 22.6, Kon (1/ms) of 4.71 E+05, and Kdis (1/s) of 1.06 E−02; MIAB177-001 (VH: HCDR2: I48V, Y50A, D54S, S55G, Y57S, N59Y) showed Kd (nM) of 218, Kon (1/ms) of 3.91 E+05, and Kdis (1/s) of 8.51 E−02; and MIAB178-001 (VH: HCDR1: D31S, F32Y; HCDR2: Y50A, D54S, Y57S, N59Y) showed Kd (nM) of 519, Kon (1/ms) of 3.72 E+05, and Kdis (1/s) of 2.20 E−01. MIAB177 and MIAB178 have reduced affinity to MAdCAM.

[0814] In another experiment PRNT1 showed Kd (nM) of 14.8, Kon (1/ms) of 3.96 E+05, and Kdis (1/s) of 5.86 E−03; MIAB182-001 (HCDR1: D31S, F32Y; HCDR2: I48V, Y50A, D54S, S55G, Y57S, N59Y; VK: V29I) showed Kd (nM) of 119, Kon (1/ms) of 2.26 E+05, and Kdis (1/s) of 2.67 E−02; MIAB183-001 (HCDR1: D31S, F32Y; HCDR2: I48V, Y50A, D54S, S55G, Y57S, N59Y; VK: R31S) showed Kd (nM) of 362, Kon (1/ms) of 1.66 E+05, and Kdis (1/s) of MIAB184-001 (HCDR1: D31S, F32T; HCDR2: I48V, Y50A, D54S, S55G, Y57S, N59Y; VK: V29I, R31S) showed Kd (nM) of 563, Kon (1/ms) of 1.45 E+05, and Kdis (1/s) of 8.18 E−02. Germlining heavy chain with V29I reduced MAdCAM affinity by 10-fold, germlining heavy chain with R31S reduced MAdCAM affinity by 20-fold, and germlining heavy chain and light chain reduced MAdCAM affinity by 40-fold.

### Example 9. MAdCAM-IL2 Molecules with the MAdCAM Y105I Mutation and IL-2 T3A Mutation do not Show Non Specific Binding to DNA and Insulin Irrespective of Expression Host

[0815] An immunosorbent plate was coated with dsDNA at a concentration of 1 μg/mL or Insulin at 5 pg/mL in PBS pH 7.4, 75 ul/well, and incubated overnight at 4° C. Wells were washed with PBS pH 7.4 containing 0.05% Tween-20 (wash buffer) three times, and then blocked with 200 ul/well 1% BSA in PBS pH 7.4 (block buffer) for two hours at room temperature. After three washes with wash buffer, TAs and controls Lenzilumab and Elotuzumab were diluted to 100 nM in PBS containing 1% BSA and 0.05% Tween-20 (assay buffer). The diluted material was added to the DNA/insulin coated plate at 75 ul/well for 1 hour at room temperature. After three washes with wash buffer, a donkey anti-human FcY HRP conjugated polyclonal antibody, diluted to 1:5000 in assay buffer, was added to the plate at 75 ul/well for 1 hr at room temperature. After three washes with wash buffer and three washes with wash buffer (with no tween-20), the assay was developed with TMB, and stopped with 1N HCL. OD 450 nm was measured. The experiment included appropriate controls for non-specific binding of test articles to the plate/block in the absence of DNA or insulin. MIAB198-CHO showed dsDNA polyreactivity score of 1.36, and Insulin polyreactivity score of 3.19; MIAB198-HEK showed dsDNA polyreactivity score of 2.02, and Insulin polyreactivity score of 3.63; Elotuzumab control showed dsDNA polyreactivity score of 1.16, and Insulin polyreactivity score of 3.43; and Lenzilumab control showed dsDNA polyreactivity score of 49.51, and Insulin polyreactivity score of 69.22. No non-specific binding to DNA and insulin was seen with MIAB198 expressed in CHO or HEK cells.

### Example 10. MAdCAM-IL2 Molecules with the MAdCAM Y105I Mutation, IL-2 T3A Mutation, and Light Chain V29I Germline Mutation do not Show Non Specific Binding to DNA and Insulin and are Expression Host Dependent

[0816] An immunosorbent plate was coated with dsDNA at a concentration of 1 μg/mL or Insulin at 5 μg/mL in PBS pH 7.4, 75 ul/well, and incubated overnight at 4° C. Wells were washed with PBS pH 7.4 containing 0.05% Tween-20 (wash buffer) three times, and then blocked with 200 ul/well 1% BSA in PBS pH 7.4 (block buffer) for two hours at room temperature. After three washes with wash buffer, TAs and controls Lenzilumab and Elotuzumab were diluted to 100 nM in PBS containing 1% BSA and 0.05% Tween-20 (assay buffer). The diluted material was added to the DNA/insulin coated plate at 75 ul/well for 1 hour at room temperature. After three washes with wash buffer, a donkey anti-human FcY HRP conjugated polyclonal antibody, diluted to 1:5000 in assay buffer, was added to the plate at 75 ul/well for 1 hr at room temperature. After three washes with wash buffer and three washes with wash buffer (with no tween-20), the assay was developed with TMB, and stopped with 1N HCL. OD 450 nm was measured. The experiment included appropriate controls for non-specific binding of test articles to the plate/block in the absence of DNA or insulin. PRNT1-CHO showed dsDNA polyreactivity score of 20.59, and Insulin polyreactivity score of 7.07; PRNT1-HEK showed dsDNA polyreactivity score of 28.08, and Insulin polyreactivity score of 13.16; MIAB185-CHO showed dsDNA polyreactivity score of 3.43, and Insulin polyreactivity score of 5.07; MIAB185-HEK showed dsDNA polyreactivity score of 23.11, and Insulin polyreactivity score of 38.37; MIAB188-CHO showed dsDNA polyreactivity score of 1.41, and Insulin polyreactivity score of 4.20; MIAB188-HEK showed dsDNA polyreactivity score of 32.80, and Insulin polyreactivity score of 83.29; Elotuzumab control showed dsDNA polyreactivity score of 0.92, and Insulin polyreactivity score of 1.09; and Lenzilumab control showed dsDNA polyreactivity score of 24.07, and Insulin polyreactivity score of 7.93. No non-specific binding to DNA and insulin was seen with MIAB185 and MIAB188 expressed in CHO cells.

### Example 11. MIAB197 is Stable for 1 Month at 4° C. and 37° C.

[0817] MIAB197 in acetate buffer was concentrated to 5 mg/mL using spin columns. Samples were collected at various concentrations and analyzed by size exclusion chromatography on an Agilent BioAdvance SEC 300 A column. MIAB197 at 5 mg/mL was incubated at 4 and 37° C. for up to 28 days to analyze molecule's stability over time. Samples were collected at various time points and analyzed by size exclusion chromatography on an Agilent BioAdvance SEC 300 A column. No concentration dependent aggregation was observed with MIAB197 when concentrated up to 5 mg/mL in optimized acetate buffer as seen by analytical SEC. MIAB197 at concentration of 5 mg/mL remained stable with no loss of main peak or appearance of high or low molecular weight species at 4° C. and 37° C. for 1 month.

### Example 12. MIAB197 has Favorable Thermal Stability

[0818] The samples were submitted to the Nano DSC system (TA Instrument) for analysis. A temperature ramp of 1° C./min was performed with monitoring from 25° C. to 100° C. Thermograms of the blank buffer were subtracted from each antibody prior to analysis and the Tm values were calculated after deconvolution using the Nano DSC software. PRNT1 showed Tm (C) peak 1 of 64.5, peak 2 of 81.7, and peak 3 of 83.8; MIAB197 showed Tm peak 1 of 69.8, peak 2 of 81.7, and peak 3 of 84. MIAB197 has favorable thermal stability.

### Example 13. MIAB197 has Desirable Characteristics for Development

[0819] To characterize the identity and purity of the samples, the samples were prepared in reducing labeling buffer before being submitted to the LabChip GXII system (PerkinElmer). rCE SDS revealed PRNT1 to comprise 26.5% light chain and 71.6% heavy chain; and MIAB197 to comprise 28.47% light chain and 71.53% heavy chain. MIAB197 has good characteristics for development.

### Example 14. MIAB197 has Isoelectric Point Compatible with Manufacturing

[0820] The sample was diluted in a matrix of methyl cellulose, 4 M urea, 3-10 pharmalytes (4%), mM Arginine, and pI markers (indicated below). The mixture was submitted to an iCE3 IEF Analyzer (ProteinSimple) and pre-focused at 1,500 V followed by focusing at 3,000 V. The isoelectric points of each peak were calculated from the bracketing pI markers. Capillary isoelectric focusing (cIEF) showed isoelectric peaks of 7.72 with peak area (%) of 0.60, 7.82 with peak area of 1.94, 7.96 with peak area of 5.98, 8.11 with peak area of 10.52, 8.24 with peak area of 32.43, 8.33 with peak area of 22.95, 8.39 with peak area of 12.56, 8.44 with peak area of and 8.54 with peak area of 7.81 for PRNT1; and isoelectric peaks of 8.55 with peak area (%) of 3.63, 8.60 with peak area of 8.66, 8.69 with peak area of 18.38, 8.72 with peak area of 28.79, and 8.76 with peak area of 40.54 for MIAB197. Isoelectirc peaks for MIAB197 are all above pH 8.5, with −70% at pI of 8.7 which is favorable for manufacturability

### Example 15. MIAB204 Dos not Show Non Specific Binding to DNA and Insulin

[0821] Non-specific DNA and Insulin binding is predictive of poor pharmacokinetics (PK). An immunosorbent plate was coated with dsDNA at a concentration of 111 g/mL or Insulin at 5 μg/mL in PBS pH 7.4, 75 ul/well, and incubated overnight at 4° C. Wells were washed with PBS pH 7.4 containing 0.05% Tween-20 (wash buffer) three times, and then blocked with 200 ul/well 1% BSA in PBS pH 7.4 (block buffer) for two hours at room temperature. After three washes with wash buffer, TAs and controls Lenzilumab and Elotuzumab were diluted to 100 nM in PBS containing 1% BSA and 0.05% Tween-20 (assay buffer). The diluted material was added to the DNA/insulin coated plate at 75 ul/well for 1 hour at room temperature. After three washes with wash buffer, a donkey anti-human FcY HRP conjugated polyclonal antibody, diluted to 1:5000 in assay buffer, was added to the plate at 75 ul/well for 1 hr at room temperature. After three washes with wash buffer and three washes with wash buffer (with no tween-20), the assay was developed with TMB, and stopped with 1N HCL. OD 450 nm was measured. The experiment included appropriate controls for non-specific binding of test articles to the plate/block in the absence of DNA or insulin. MIAB204 showed dsDNA polyreactivity score of 1.66, and Insulin polyreactivity score of 8.43; Elotuzumab control showed dsDNA polyreactivity score of 1.16, and Insulin polyreactivity score of 3.43; and Lenzilumab control showed dsDNA polyreactivity score of 49.51, and Insulin polyreactivity score of 69.23. MIAB204 is not polyreactive.

### Example 16. MIAB204 has Favorable Thermal Stability

[0822] The samples were submitted to the Nano DSC system (TA Instrument) for analysis. A temperature ramp of 1° C./min was performed with monitoring from 25° C. to 100° C. Thermograms of the blank buffer were subtracted from each antibody prior to analysis and the Tm values were calculated after deconvolution using the Nano DSC software. PRNT1 showed Tm (C) peak 1 of 64.5, peak 2 of 81.7, and peak 3 of 83.8; MIAB204 showed Tm peak 1 of 65.4, peak 2 of 69.5, and peak 3 of 84.4. MIAB204 has favorable thermal stability.

### Example 17. MIAB204 has Desirable Characteristics for Development

[0823] To characterize the identity and purity of the samples, the samples were prepared in reducing labeling buffer before being submitted to the LabChip GXII system (PerkinElmer). rCE SDS revealed PRNT1 to comprise 26.5% light chain and 71.6% heavy chain; and MIAB204 to comprise one peak comprising 80.64% and second peak comprising 19.36% of the sample. MIAB204 showed different 0-glycan occupancies. MIAB204 has good characteristics for development.

### Example 18. MIAB204 has Isoelectric Point Compatible with Manufacturing

[0824] The sample was diluted in a matrix of methyl cellulose, 4 M urea, 3-10 pharmalytes (4%), 5 mM Arginine, and pI markers (indicated below). The mixture was submitted to an iCE3 IEF Analyzer (ProteinSimple) and pre-focused at 1,500 V followed by focusing at 3,000 V. The isoelectric points of each peak were calculated from the bracketing pI markers. Capillary isoelectric focusing (cIEF) showed isoelectric peaks of 7.72 with peak area (%) of 0.60, 7.82 with peak area of 1.94, 7.96 with peak area of 5.98, 8.11 with peak area of 10.52, 8.24 with peak area of 32.43, 8.33 with peak area of 22.95, 8.39 with peak area of 12.56, 8.44 with peak area of 5.21, and 8.54 with peak area of 7.81 for PRNT1; and isoelectric peaks of 7.59 with peak area (%) of 2.92, 7.84 with peak area of 5.94, 8.00 with peak area of 14.88, 8.19 with peak area of 18.64, 8.29 with peak area of 5.80, 8.33 with peak area of 10.73, 8.38 with peak area of 22.13, 8.43 with peak area of 14.04, and 8.48 with peak area of 4.92 for MIAB204. Isoelectirc peaks for MIAB204 show heterogeneity with most peaks having the pI greater than 8. MIAB204 is considered good for manufacturing.

### Example 19. MAdCAM-IL-2 M Molecules do not Block the Interaction Between Recombinant Human MAdCAM and Alpha4 Beta7-Positive Hut-78 T Cells

[0825] 96 well plates were coated with 2.5 ug/mL recombinant human MAdCAM-Fc in PBS overnight at 4° C. Plated were blocked with DMEM containing 20% FBS for 30 minutes at 37° C., and MIAB210 (control), PRNT1, PRNT2, MIAB197, MIAB12, MIAB13, MIAB25, MIAB26, MIAB37, a benchmark molecule, a negative control molecule, and a positive control molecule were captured for 1 hour at 37° C. in PBS. Hut-78 cells were incubated in 20% FBS DMEM supplemented with 1 mM MnCl2 for 1 hour at 37° C., and the cells were added to plates for 1 hour at 37° C. Plated were washed with PBS supplemented with 1 mM MnCl2 3 times, followed by 100 uL of cell titer glo. Plates were shaken for 2 minutes, and incubated at room temperature for another 10 minutes. Luminescence was measured and revealed lack of inhibition of MAdCAM and alpha4 beta7 interaction. MAdCAM-IL-2 M bi-specifics do not block the interaction between recombinant human MAdCAM and alpha4 beta7-positive Hut-78 T cells. Optimized MAdCAM-IL-2 M bi-specifics do not block MAdCAM-alpha4 beta7 interaction in vitro and therefore should not interfere with the trafficking of alpha4 beta7-positive T cells in vivo.

### Example 20. MAdCAM-IL-2 M Molecules Selectively Induce P-STAT5 Phosphorylation on Primary Tregs Versus Teff or NK Cells when Tethered to Human/Mouse MAdCAM Expressing CHO Cells

[0826] Parental CHO cells or CHO cells over-expressing human MAdCAM or murine MAdCAM were seeded onto wells of a 96 well plate (Corning) overnight. After washing 3 times with F12+10% FBS media, the plate was blocked for 1 hour with 5 uM whole human IgG. 10 nM parental MAdCAM-IL-2 M bi-specifics PRNT1 and PRNT2, or optimized variants MIAB12, MIAB13, MIAB25, MIAB26, MIAB37, MIAB204 and MIAB197 were captured for 1 hour. After washing 2 times with F12+10% FBS media, freshly-isolated human PBMCs were stimulated for 60 minutes with captured IL-2 MM bispecifics. Cells were then fixed for 10 minutes with BD Cytofix, permeabilized sequentially with BD Perm III, and BioLegend FOXP3 permeabilization buffer, blocked with human serum and stained for 30 minutes with antibodies against phospho-STAT5 A488, CD25 PE, FOXP3 AF647 and CD4 PerCP Cy5.5, CD3 BV421, CD56 BV785 and acquired on an Attune NXT with plate loader. PRNT1, PRNT2, MIAB1, MIAB12, MIAB13, MIAB25, MIAB26, MIAB37, MIAB204, and MIAB197 showed P-STAT5-positive Tregs. Accordingly, PRNT1, PRNT2, MIAB1, MIAB12, MIAB13, MIAB25, MIAB26, MIAB37 MIAB204, and MIAB197 selectively activate Tregs.

### Example 21. V69A and Q74P Substitutions in the IL-2 Mutein are Beneficial in Improving Solubility of the Molecule

[0827] The pTT5 vectors containing the full length IgG1 heavy with C-terminally fused human IL-2 mutant and light chain encoding MIAB211 (control IgG1 mAb) were co-transfected at equimolar ratios into HEK cells. After 5-7 days, cell culture supernatants expressing MIAB211 (control IgG1 mAb) were harvested, and clarified by centrifugation and filtration through a filtration device. MIAB211, was captured on Mab Select column. The column was washed with PBS pH 7.4 and the captured protein was eluted using 0.1 M glycine pH 2.5, with neutralization using a tenth volume of 1 M Tris pH 8.0. The protein was buffer exchanged into PBS pH 7.4, and analyzed by size exclusion chromatography on an Agilent BioAdvance SEC 300 A column. MIAB211 (control IgG1 mAb) was aggregated with only 67% monodispersed after ProA purification as shown by size exclusion chromatography. Additional polishing procedures like cation exchange improved the monodispersity to 86% which is not suitable for assays. V69A and Q74P are beneficial in improving solubility of molecule.

### Example 22. PD-1-MAdCAM Molecules with Heavy Chain Mutations Bind Human MAdCAM

[0828] Anti-human IgG Fc (AHC) biosensors were equilibrated in assay buffer for 20 minutes. Test article was diluted to 10 μg/mL in assay buffer. A seven-point two-fold serial dilution of human MAdCAM-1 was prepared in assay buffer, starting at 300 nM down to 4.69 nM. Test article was loaded on tips for 240 s followed by a 120 s association phase with MAdCAM and 120 s dissociation phase in assay buffer. Kinetic parameters (Kon and Koff) and dissociation constant (Kd) were calculated from a 1:1 global fit model using the data analysis software of the Octet96 RED software version 10. Parental molecule showed Kd (nM) of 62.8, Kon (1/ms) of 5.81 E+05, and Koff (1/s) of 3.65 E−02; PMAB19 showed Kd of 31.2, Kon of 5.40 E+05, and Koff of 1.68 E−02; PMAB20 showed Kd of 90.5, Kon of 4.11 E+05, and Koff of 3.72 E−02; PMAB23 showed Kd of 110, Kon of 3.55 E+05, and Koff of 3.89 E−02; PMAB24 showed Kd of 33.2, Kon of 4.04 E+05, and Koff of 1.34 E−02; PMAB25 showed Kd of 43.6, Kon of 4.86 E+05, and Koff of 2.12 E−02; PMAB26 showed Kd of 138, Kon of 4.76 E+05, and Koff of 6.58 E−02; PMAB27 showed Kd of 92.2, Kon of 138 E+06, and Koff of 1.28 E−01; PMAB28 showed Kd of 86.2, Kon of 1.05 E+06, and Koff of 9.02 E−02; and PMAB21 and PMAB22 showed no binding. PMAB19, PMAB20, PMAB23, PMAB24, PMAB25, PMAB26, PMAB27, and PMAB28 comprising heavy chain mutations bind to human MAdCAM.

### Example 23. PD-1-MAdCAM Molecules with Light Chain Mutations Bind Human MAdCAM

[0829] Anti-human IgG Fc (AHC) biosensors were equilibrated in assay buffer for 20 minutes. Test article was diluted to 10 μg/mL in assay buffer. A seven-point serial dilution of human MAdCAM-1 was prepared in assay buffer, starting at 200 nM down to 3.13 nM. Test article was loaded on tips for 240 s followed by a 120 s association phase with MAdCAM and 120 s dissociation phase in assay buffer. Kinetic parameters (Kon and Koff) and dissociation constant (Kd) were calculated from a 1:1 global fit model using the data analysis software of the Octet96 RED software version 10. Parental molecule showed Kd (nM) of 135, Kon (1/ms) of 2.52 E+05, and Koff (1/s) of 3.41 E−02; PMAB36 showed Kd of 109, Kon of 2.98 E+05, and Koff of 3.25 E−02; PMAB37 showed Kd of 285, Kon of 2.94 E+05, and Koff of 8.38 E−02; PMAB41 showed Kd of 43.5 uM, Kon of 2.12 E+03, and Koff of 9.25 E−02; PMAB42 showed Kd of 395, Kon of 2.88 E+05, and Koff of 1.14 E−01; and PMAB38, PMAB39, PMAB40, and PMAB43 showed no binding. PMAB36, PMAB37, PMAB41, and PMAB42 comprising light chain mutations bind to human MAdCAM.

### Example 24. PD-1-MAdCAM Molecules with Germline Mutations Bind Human MAdCAM

[0830] Anti-human IgG Fc (AHC) biosensors were equilibrated in assay buffer for 20 minutes. Test article was diluted to 10 μg/mL in assay buffer. A seven-point serial dilution of human MAdCAM-1 was prepared in assay buffer, starting at 200 nM down to 3.13 nM. Test article was loaded on tips for 240 s followed by a 120 s association phase with MAdCAM and 120 s dissociation phase in assay buffer. Kinetic parameters (Kon and Kdis) and dissociation constant (Kd) were calculated from a 1:1 global fit model using the data analysis software of the Octet96 RED software version 10. Parental molecule showed Kd (M) of 1.15 E−07, Kon (1/ms) of 3.06 E+05, and Kdis (1/s) of 3.51 E−02; PMAB13 showed Kd of 1.32 E−07, Kon of 5.42 E+05, and Kdis of 7.17 E−02; PMAB12 showed Kd of 6.33 E−08, Kon of 7.33 E+05, and Kdis of 4.64 E−02; PMAB11 showed Kd of 4.66 E−07, Kon of 4.19 E+05, and Kdis of 1.95 E−01; PMAB10 showed Kd of 1.46 E−07, Kon of 6.62 E+05, and Kdis of 9.67 E−02; PMAB9 showed Kd of 1.59 E−07, Kon of 4.55 E+05, and Kdis of 7.25 E−02; PMAB8 showed Kd of 7.14 E−08, Kon of 6.56 E+05, and Kdis of 4.69 E−02; PMAB7 showed Kd of 2.36 E−07, Kon of 5.76 E+05, and Kdis of 1.36 E−01; PMAB6 showed Kd of 1.50 E−07, Kon of 6.98 E+05, and Kdis of 1.05 E−01; PMAB5 showed Kd of 4.13 E−07, Kon of 2.90 E+05, and Kdis of 1.20 E−01; PMAB4 showed Kd of 4.18 E−08, Kon of 1.31 E+06, and Kdis of 5.47 E−02; PMAB3 showed Kd of 3.33 E−07, Kon of 7.17 E+05, and Kdis of 2.39 E−01; and PMAB2 showed Kd of 1.75 E−07, Kon of 7.25 E+05, and Kdis of 1.27 E−01. PD-1-MAdCAM Molecules comprising germline mutations bind to human MAdCAM.

### Example 25. PD-1-MAdCAM Molecules with Single Mutations Bind Mouse MAdCAM

[0831] Anti-human IgG Fc (AHC) biosensors were equilibrated in assay buffer for 20 minutes. Test article was diluted to 10 μg/mL in assay buffer. A seven-point serial dilution of mouse MAdCAM-1 was prepared in assay buffer, starting at 500 nM down to 7.82 nM. Test article was loaded on tips for 180 s followed by a 120 s association phase with MAdCAM and 150 s dissociation phase in assay buffer. Kinetic parameters (Kon and Kdis) and dissociation constant (Kd) were calculated from a 1:1 global fit model using the data analysis software of the Octet96 RED software version 10. Parental molecule showed Kd (M) of 1.38 E−07, Kon (1/ms) of 1.48 E+05, Kdis (1/s) of 2.04 E−02, and response of 0.1387; PMAB19 showed Kd of 1.12 E−07, Kon of 1.58 E+05, Kdis of 1.77 E−02, and response of 0.1494; PMAB20 showed Kd of 1.18 E−07, Kon of 1.63 E+05, Kdis of 1.93 E−02, and response of 0.1531; PMAB23 showed Kd of 1.41 E−07, Kon of 1.26 E+05, Kdis of 1.78 E−02, and response of 0.1406; PMAB24 showed Kd of 5.24 E−08, Kon of 1.14 E+05, Kdis of 5.96 E−03, and response of 0.0549; PMAB25 showed Kd of 1.15 E−07, Kon of 1.05 E+05, Kdis of 1.20 E−02, and response of 0.1328; PMAB26 showed Kd of 1.34 E−07, Kon of 8.79 E+04, Kdis of 1.18 E−02, and response of 0.132; PMAB27 showed Kd of 1.02 E−06, Kon of 4.58 E+03, Kdis of 4.69 E−03, and response of 0.0278; PMAB28 showed Kd of 1.03 E−07, Kon of 8.59 E+04, Kdis of 8.86 E−03, and response of 0.083; PMAB36 showed Kd of 2.06 E−07, Kon of 1.22 E+05, Kdis of 2.51 E−02, and response of 0.1689; PMAB3? showed Kd of 1.76 E−07, Kon of 1.01 E+05, Kdis of 1.78 E−02, and response of 0.1518; PMAB41 showed Kd of 1.19 E−07, Kon of 2.08 E+05, Kdis of 2.46 E−02, and response of 0.1887; and PMAB42 showed Kd of 1.05 E−07, Kon of 1.62 E+05, Kdis of 1.70 E−02, and response of 0.1287. PD-1-MAdCAM Molecules comprising single mutations bind to mouse MAdCAM.

### Example 26. PD-1-MAdCAM Molecules with Single Hydrophobic Patch Mutations Bind Human MAdCAM

[0832] Anti-human IgG Fc (AHC) biosensors were equilibrated in assay buffer for 20 minutes. Test article was diluted to 10 μg/mL in assay buffer. A seven-point serial dilution of human MAdCAM-1 was prepared in assay buffer, starting at 200 nM down to 3.13 nM. Test article was loaded on tips for 240 s followed by a 120 s association phase with MAdCAM and 120 s dissociation phase in assay buffer. Kinetic parameters (Kon and Koff) and dissociation constant (Kd) were calculated from a 1:1 global fit model using the data analysis software of the Octet96 RED software version 10. Parental molecule showed Kd (nM) of 116, Kon (1/ms) of 2.38 E+05, and Koff (1/s) of 2.76 E−02; PMAB45 showed Kd of 735 uM, Kon of 5.91 E+02, and Koff of 4.34 E−01; PMAB46 showed Kd of 37.9 uM, Kon of 8.16 E+03, and Koff of 3.09 E−01; PMAB47 showed Kd of 219, Kon of 3.29 E+05, and Koff of 7.20 E−02; PMAB48 showed Kd of 51 uM, Kon of 9.33 E+03, and Koff of 1.33 E−01; PMAB49 showed Kd of 142, Kon of 8.79 E+04, and Koff of 1.25 E−02; PMAB51 showed Kd of 93.5, Kon of 1.15 E+05, and Koff of 9.52 E−03; and PMAB44 and PMAB50 showed no binding. PMAB45, PMAB46, PMAB47, PMAB48, PMAB49, and PMAB51 comprising single hydrophobic patch mutations bind to human MAdCAM.

### Example 27. Optimized PD-1-MAdCAM Molecules Bind Human and Mouse MAdCAM

[0833] Kinetic parameters (Kon and Koff) and dissociation constant (Kd) were assessed and calculated as described above. Binding kinetics to human MAdCAM of the parental molecule showed Kd (M) of 3.76 E−08 with a Kd error of 3.76 E−08, Kon (1/ms) of 1.06 E+06 with a Kon error of 3.32 E+04, Kdis (1/s) of 3.98 E−02 with a Kdis error of 1.36 E−03, and response of 0.0839; PMAB15 showed Kd of 7.31 E−08 with a Kd error of 3.82 E−09, Kon of 1.15 E+06 with a Kon error of 4.99 E+04, Kdis of 8.39 E−02 with a Kdis error of 2.42 E−03, and response of 0.0655; PMAB16 showed Kd of 1.34 E−07 with Kd error of 4.18 E−09, Kon of 4.72 E+05 with a Kon error of 1.26 E+04, Kdis of 6.31 E−02 with a Kdis error of 1.03 E−03, and response of 0.1856; and PMAB17 showed Kd of 1.71 E−08 with Kd error of 1.02 E−09, Kon of 3.73 E+06 with a Kon error of 1.72 E+05, Kdis of 6.36 E−02 with a Kdis error of 2.42 E−03, and response of 0.0416. Binding kinetics to mouse MAdCAM of the parental molecule showed Kd (M) of 1.24 E−07 with a Kd error of 5.96 E−09, Kon (1/ms) of 3.74 E+05 with a Kon error of 1.35 E+04, Kdis (1/s) of 4.63 E−02 with a Kdis error of 1.49 E−03, and response of 0.256; PMAB15 binding was inconclusive; PMAB16 showed Kd of 3.34 E−07 with Kd error of 1.34 E−08, Kon of 2.48 E+05 with a Kon error of 8.63 E+03, Kdis of 8.28 E−02 with a Kdis error of 1.64 E−03, and response of 0.0407; and PMAB17 binding was inconclusive. PMAB15, PMAB16, and PMAB17 bind to human MAdCAM, and PMAB16 binds to mouse MAdCAM. While the combination of germline mutations in PMAB15 and PMAB17 have the appropriate affinity for human MAdCAM, the binding to mouse MAdCAM is severely compromised.

### Example 28. Optimized PD-1-MAdCAM Molecules Bind Human, Cyno, and Mouse MAdCAM

[0834] Kinetic parameters (Kon and Koff) and dissociation constant (Kd) were assessed and calculated as described above. Binding kinetics to human MAdCAM of PMAB57 showed Kd (M) of 1.22 E−07 with a Kd error of 7.08 E−09, Kon (1/ms) of 3.20 E+05 with a Kon error of 1.77 E+04, Kdis (1/s) of 3.89 E−02 with a Kdis error of 6.84 E−04, and response of 0.1804; PMAB18 showed Kd of 1.98 E−07 with a Kd error of 1.23 E−08, Kon of 2.59 E+05 with a Kon error of 1.54 E+04, Kdis of 5.11 E−02 with a Kdis error of 9.93 E−04, and response of 0.1842. Binding kinetics to cyno MAdCAM of PMAB57 showed Kd (M) of 4.99 E−08 with a Kd error of 8.00 E−10, Kon (1/ms) of 3.06 E+05 with a Kon error of 4.74 E+03, Kdis (1/s) of 1.53 E−02 with a Kdis error of 6.39 E−05, and response of 0.169; PMAB18 showed Kd of 2.26 E−08 with a Kd error of 5.51 E−10, Kon of 4.53 E+05 with a Kon error of 1.07 E+04, Kdis of 1.02 E−02 with a Kdis error of 6.08 E−05, and response of 0.1447. Binding kinetics to mouse MAdCAM of PMAB57 showed Kd (M) of 2.05 E−07 with a Kd error of 4.09 E−10, Kon (1/ms) of 2.72 E+05 with a Kon error of 5.63 E+03, and Kdis (1/s) of 5.58 E−02 with a Kdis error of 5.43 E−04; PMAB18 showed Kd of 2.01 E−07 with a Kd error of 4.41 E−10, Kon of 3.86 E+05 with a Kon error of 1.01 E+04, and Kdis of 7.76 E−02 with a Kdis error of 8.45 E−04. Optimized PD-1-MAdCAM antibody affinity for MAdCAM matches the targets across human, cyno, and mouse MAdCAM.

### Example 29. Optimized PD-1-MAdCAM Molecules Bind Human, Cyno, and Mouse MAdCAM Regardless of the PD-1 Agonist

[0835] Kinetic parameters (Kon and Koff) and dissociation constant (Kd) were assessed and calculated as described above. Binding kinetics to human MAdCAM of PMAB58 showed Kd of 1.35 E−07, Kon of 7.12 E+04, and Kdis of 9.61 E−03; PMAB53 showed Kd of 4.97 E−08, Kon of 1.44 E+04, and Kdis of 7.16 E−04; PMAB56 showed Kd of 2.08 E−07, Kon of 2.36 E+04, and Kdis of 4.91 E−03; PMAB59 showed Kd of 1.40 E−07, Kon of 3.83 E+04, and Kdis of 5.37 E−03; PMAB54 showed Kd of 5.92 E−07, Kon of 2.36 E+05, and Kdis of 1.40 E−01; and PMAB55 showed Kd of 4.76 E−08, Kon of 3.43 E+04, and Kdis of 1.63 E−03. Binding kinetics to cyno MAdCAM of PMAB58 showed Kd of 9.13 E−09, Kon of 2.29 E+05, and Kdis of 2.09 E−03; PMAB53 showed Kd of 3.79 E−07, Kon of 5.71 E+04, and Kdis of 2.17 E−02; PMAB56 showed Kd of 9.65 E−08, Kon of 6.12 E+05, and Kdis of 5.91 E−02; PMAB59 showed Kd of 1.66 E−08, Kon of 1.09 E+05, and Kdis of 1.82 E−03; PMAB54 showed Kd of 1.58 E−07, Kon of 7.19 E+04, and Kdis of 1.14 E−02; and PMAB55 showed Kd of 4.43 E−08, Kon of 2.09 E+05, and Kdis 9.24 E−03. Binding kinetics to mouse MAdCAM of PMAB58 showed Kd of 3.30 E−07, Kon of 2.51 E+05, and Kdis 8.25 E−02; PMAB53 showed Kd of 1.74 E−06, Kon of 1.25 E+05, and Kdis of 2.17 E−01; PMAB56 showed Kd of 1.61 E−07, Kon of 9.12 E+03, and Kdis of 1.47 E−03; PMAB59 showed Kd of 1.31 E−07, Kon of 1.30 E+04, and Kdis of 1.70 E−03; PMAB54 showed Kd of 2.48 E−07, Kon of 5.57 E+03, and Kdis of 1.38 E−03; and PMAB55 showed Kd of 5.95 E−08, Kon of 2.20 E+04, and Kdis of 1.31 E−03. Optimized PD-1-MAdCAM antibodies bind human, cyno, and mouse MAdCAM regardless of the PD-1 agonist, but strongly favor M to L mutants such as PMAB56 and PMAB55.

### Example 30. Optimized PD-1-MAdCAM Molecules are Thermally Stable

[0836] Thermal stability of PMAB58, PMAB53, PMAB56, PMAB59, PMAB54, and PMAB55 was evaluated as described above. The data showed that the onset of melting temperature for the M to L mutants, such as PMAB56 and PMAB55, was very similar to their respective parental clones. The M to I mutants, such as PMAB53 and PMAB54, had a higher Tm than the parental and M to L mutant, however the difference in Tm is not significant. The T aggregation onset was measured at 493 nm and produced similar values for PMAB58, PMAB53, and PMAB56; and PMAB59, PMAB54, and PMAB55. Overall, there was no significant difference in the temperature of aggregation onset. Freeze thaw stability was slightly better for the M to L mutants when compared to the initial POI, and the aSEC data showed that the initial peak heights were lower for the M to L mutants in comparison to the parental clone. Accordingly, the optimized PD-1-MAdCAM molecules are thermally stable.

### Example 31. Y105D Mutation Decreases Polyreactive Binding to Insulin

[0837] Plates were coated overnight with dsDNA and human insulin in 1×PBS. Plates were blocked with 1×PBS with 1% BSA. Antibody binding was tested at 100 nM. Sample signal was normalized to the background signal (coated wells with 2° antibody only). The data showed good dsDNA polyreactivity scores for all samples except the Y105K mutant and negative control antibody; and good Insulin polyreactivity scores for all samples except the Y105K mutant and the negative control antibody. The Y105D mutant showed improved lower Insulin polyreactivity scores than other mutant. Polyreactive binding of the Y103G, Y105D, and Y105K mutants to dsDNA and human insulin shows that the Y105D hydrophobic patch mutation decreases polyreactive binding to human insulin compared to the parental antibody.

### Example 32. PMAB16 has Decreased Polyreactive Binding to BVP or HEK Cell Lysate

[0838] Plates were coated with 1% Baculovirus particle (BVP) or HEK293 cell lysate (HCL) in carbonate buffer pH 9.5, 4° C. overnight. Plates were blocked with 1×PBS with 2% BSA. Antibodies were tested in triplicate for binding to BVP or HCL at 150, 50, 16.7 and 5.6 μg/mL. Signal was normalized to background signal (coated wells with 2° antibody only). BVP and HCL polyreactivity scores were lower for the PMAB16 antibody as compared to parental PMAB1 when used at 50 ug/mL or 16.7 ug/mL concentrations. Accordingly, the optimized PMAB16 antibody has decreased polyreactivity to BVP or HCL compared to the parent clone.

### Example 33. PMAB16 has Decreased Isoelectric Point

[0839] The sample was diluted in a matrix of methyl cellulose, 4 M urea, 3-10 pharmalytes (4%), 5 mM Arginine, and pI markers (indicated below). The mixture was submitted to an iCE3 IEF Analyzer (ProteinSimple) and pre-focused at 1,500 V followed by focusing at 3,000 V. The isoelectric points of each peak were calculated from the bracketing pI markers. Capillary isoelectric focusing (cIEF) showed isoelectric peaks of 8.71 with peak area (%) of 5.75, 8.97 with peak area of 19.20, 9.03 with peak area of 10.63, 9.09 with peak area of 16.92, and 9.13 with peak area of 47.50 for the PMAB1 antibody; and isoelectric peaks of 8.50 with peak area (%) of 3.90, 8.58 with peak area of 6.36, 8.73 with peak area of 45.74, and 8.76 with peak area of 44.00 for PMAB16. All isoelectric peaks for PMAB16 show the pI greater than 8. PMAB16 is considered good for manufacturing.

### Example 34. PMAB16 has Decreased Concentration Dependent Aggregation

[0840] Antibodies were affinity purified and buffer exchanged into phosphate buffer, pH 7.0 containing 8.5% sucrose and 100 mM NaCl. Each antibody was then concentrated using a centrifugal concentrator with samples taken at the indicated concentrations for analysis by analytical SEC. The optimized MAdCAM clone PMAB16 showed a decrease in concentration dependent aggregation compared to the parental PMAB1 antibody sequence.

### Example 35. PMAB16 has Good Storage Stability

[0841] Antibodies were concentrated using a centrifugal concentrator to a final concentration of 1 mg/mL. Samples were flash frozen at the indicated time points and aggregation was measured by analytical SEC. The optimized MAdCAM antibody PMAB16 showed good storage stability over 28 days at 4° C. PMAB16 stored in the accelerated stress condition of 37° C. also showed good stability out to 21 days. Accordingly, PMAB16 has good storage stability.

### Example 36. PMAB16 has Favorable Thermal Stability

[0842] The samples were submitted to the Nano DSC system (TA Instrument) for analysis. A temperature ramp of 1° C./min was performed with monitoring from 25° C. to 100° C. as described above. The data showed the Tm of PMAB16 to be lower than that of the parental molecule PMAB1, and improved storage stability at 4° C. and temperature dependent aggregation.

### Example 37. Identity of PMAB16 was Verified Via Mass Spectroscopy and CE-SDS

[0843] Sample was denatured and reduced by guanidine and DTT and deglycosylated by PNGase F before SEC separation and mass spectrometry. Mass spectroscopy showed two peaks for the PMAB16 sample, with values of 75542 Da for the peak 1 and 24258 for the peak 2, consisted with the expected mass.

[0844] Sample was prepared in reducing labeling buffer before electrophoresis using the LabChip GXII system. The data showed three peaks with fluorescence values of 26.85% for peak 1, 0.76% for peak 2, and 72.39% for peak 3, consistent with expected chain compositions for PMAB16.

### Example 38. Optimized MAdCAM Clones Retain Binding Specificity

[0845] Parental CHO cells or CHO cells expressing MAdCAM-1 were incubated with the indicated test articles. Bound test articles were detected by addition of a fluorescently conjugated anti-human IgG antibody. Optimized MAdCAM clones (PMAB18, PMAB59 and PMAB58) showed similar binding to the parental molecule (PMAB57).

### Example 39. PMAB18 Showed Improved Tethered Activity in Jurkat Assay

[0846] MAdCAM-expressing CHO cells were allowed to adhere and form a monolayer. Test articles were added at the indicated concentrations and allowed to bind for 1 h at 37° C. All wells were washed, and PD-1 reporter Jurkat cells were added. Jurkat cells were incubated with test article loaded CHO cells for 2 h at 37° C. PMAB18 showed improved tethered PD-1 agonist activity as compared to the parent antibody.

### Example 40. Optimized PD-1-MAdCAM Antibodies Co-Localize with MAdCAM-1

[0847] Fresh frozen mesenteric lymph node replicates from a 12-week BALB/c mouse were sectioned at 5 um, fixed with acetone, blocked with blockaid buffer solution for ten minutes room temperature and incubated with 1 and 10 nM titrations of test articles overnight at 4-degree Celsius. Tissues were then stained with anti-mouse MAdCAM and anti-human IgG Fc for two hours room temperature, DAPI counterstained and mounted and imaged with confocal microscopy. Clones including optimized MAdCAM (PMAB58 and PMAB18) co-localized with MAdCAM-1 expressing structures similarly to the parental clones (PMAB1 and PMAB57).

### Example 41. PMAB58 Prolongs Survival in Xenogeneic Graft Versus Host Disease

[0848] Xenogeneic graft versus host disease was induced by the transfer of human PBMC into immunodeficient mice. Beginning 10 days after cell transfer, mice were treated subcutaneously weekly with PMAB1, PMAB58, or vehicle. PMAB58 improved probability of survival to over days, while the median survival time for PMAB1 was 49 days, and 41 days for vehicle. Accordingly, PMAB58 improves survival time in GVHD.

### Example 42. PMAB18 Downregulates Chemokines/Cytokines in Small Intestine

[0849] Immunocompromised NSG mice were engrafted with human PBMCs 10 days prior to treatment. Mice were treated weekly with MADCAM-PD1 bispecific (3 mg/kg) for three weeks and sacrificed. Small intestine was homogenized, normalized for total protein concentration and cytokines/chemokines were measured using the 0-link proteomic platform. Data represent geometric mean and geometric standard deviation of 8 animals (log 2 scale). A student's t-test was performed on all markers; CLC4, p=0.005; IL17A, p=0.04; CXCL10, p=0.06; IFNG, p=(NPX, normalized protein expression) The vehicle data showed geoMean values of 257.9 for CCL4, 4.4 for IL17A, 14.1 for CXCL10, and 8812 for IFNG; while PMAB18 showed geoMean values of 43.8 for CCL4, 2.1 for IL17A, 3.9 for CXCL10, and 1899 for IFNG. PMAB18 reduces CCL4, IL17A, CXCL10 and IFNG in small intestine tissue from Xenogeneic graft-versus-host-disease mice. In conclusion, reduced pro-inflammatory cytokine and chemokines in target tissue suggest therapeutic effect of the MADCAM-PD1 agonist bispecific.

### Example 43. PMAB18 and PMAB58 is Detectable in Gut Tissue Through 4 Weeks Post DC Dosing

[0850] Balb/c mice were SC dosed with 1 mg/kg of PMAB18 or PMAB58. Intact PMAB18 and PMAB58 was detected in gut tissue 4 weeks after subcutaneous administration into Balb/c mice (1 mg/kg dose), revealing desirable extended PK in tissues. PMAB18 and PMAB58 remained intact and exhibited good drug like properties in systemic circulation as shown in FIG. 20A and FIG. 20B.

### Example 44. MAdCAM-IL-2 M Molecules Bind to Human or Murine MAdCAM

[0851] Parental CHO cells or CHO cells over-expressing human MAdCAM or murine MAdCAM were suspended in PBS+2% FBS media on a 96 well plate (Corning). Parental MAdCAM-IL-2 M bi-specifics PRNT2, or optimized variants MIAB197, MIAB1, MIAB12, MIAB13, MIAB25, MIAB26 or MIAB37 were captured for 30 mins on ice. After washing 2 times with PBS+2% FBS media, cells were stained for 30 minutes with an Anti-Human IgG detection antibody and TOPRO dye and acquired on an Attune NXT with plate loader. PRNT2 and MIAB197 bound to human MAdCAM with similar efficiency, and MIAB197 showed lower binding to murine MAdCAM than PRNT2. MAdCAM-IL-2 M bi-specifics bind to human or murine MAdCAM expressing cells and show minimum binding to parental CHO cells.

### Example 45. PRNT2 Variants Bind Human, Cynomolgus, and Murine MAdCAM

[0852] Anti-human Fc biosensors were equilibriated in assay buffer (1% BSA in 1×PBS with Tween-20) for 10 minutes before the experiment was set-up. Test articles were diluted to ug/mL in assay buffer and pipetted to 96 well plate. Human MAdCAM was titrated down, three-fold dilutions. Experiment was run as explained above. Dissociation constant (KD) was calculated as explained above. PRNT2 showed Kd (nM) of 62.5 in human, 51.8 in cyno, and 159.9 in mouse; MIAB1 showed Kd (nM) of 38.4 in human, 26.5 in cyno, and 183.8 in mouse; MIAB2 showed Kd (nM) of 23.2 in human, 18.8 in cyno, and 147.3 in mouse; MIAB12 showed Kd (nM) of 19.3 in human, 19.5 in cyno, and 77.5 in mouse; MIAB13 showed Kd (nM) of 45.9 in human, 33.4 in cyno, and 6.6 in mouse; MIAB25 showed Kd (nM) of 46.9 in human, 60.8 in cyno, and 131 in mouse; MIAB26 showed Kd (nM) of 49.1 in human, 78.5 in cyno, and 9.9 in mouse; MIAB121 showed Kd (nM) of 50.4 in human, 92 in cyno, and 117.1 in mouse; MIAB122 showed Kd (nM) of 48.2 in human, 68.5 in cyno, and 130.3 in mouse; MIAB123 showed Kd (nM) of 39.7 in human, 77.9 in cyno, and 163.6 in mouse; MIAB124 showed Kd (nM) of −0.2 in human, 11.5 in cyno, and −4.9 in mouse; MIAB125 showed Kd (nM) of −2.9 in human, 0.9 in cyno, and −0.3 in mouse; MIAB126 showed Kd (nM) of 91.5 in human, 84.4 in cyno, and 248.8 in mouse; MIAB209 showed Kd (nM) of 61.1 in human, 99 in cyno, and 35.2 in mouse; MIAB205 showed Kd (nM) of 56.3 in human, 117.1 in cyno, and 42.2 in mouse; MIAB206 showed Kd (nM) of 74.3 in human, 89.5 in cyno, and 7.6 in mouse; MIAB207 showed Kd (nM) of 83.5 in human, 73.7 in cyno, and 24 in mouse; and MIAB208 showed Kd (nM) of 20.2 in human, 141.6 in cyno, and 75.1 in mouse. PRNT2 variants bind human, cyno, and mouse MAdCAM with different affinities.

### Example 46. MIAB126 Improves Human/Cyno Binding without Affecting Binding to Mouse MAdCAM

[0853] Nunc Maxisorp 96-well plate was coated with 2 ug/ml MAdCAM overnight. The plate was then washed 3× with PBST. 0-500 nM of the antibody was added followed by a 300 ul 4% NFM block in PBS. Bound antibodies were detected with 1:5000 anti-Fc-HRP antibody. ELISA was developed with TMB substrate. MIAB126 variant improved affinity to human and cyno MAdCAM when compared to parent PRNT2 molecule, without change in muMAdCAM affinity.

### Example 47. PRNT2 Variants Bind Human, Cynomolgus, and Murine MAdCAM

[0854] Anti-human Fc biosensors were equilibriated in assay buffer (1% BSA in 1×PBS with 0.05% Tween-20) for 10 minutes before the experiment was set-up. Test articles were diluted to as explained above. Experiment was run as explained above. Dissociation constant (KD) was calculated as explained above. PRNT2 showed Kd of 354 nM in human, 90 uM in cyno, and 6.2 nM in mouse; MIAB126 showed Kd of 3.7 nM in human, 4.9 nM in cyno, and 17 nM in mouse. Engineering has improved the affinity of variant MIAB126 to human and cyno MAdCAM without affecting the affinity of mouse MAdCAM.

### Example 48. PRNT2 Variants have Favorable Thermal Stability

[0855] Intrinsic fluoresce of the samples was measured as function of increasing temperature to measure thermal transition on the “UNcle”. The data illustrated below shows that PRNT2 variants have favorable thermal stability. MIAB126 has improved thermal stability.

| | Average | | SD | Average | | SD | Average | | | Average | % CV | SD Tagg |
|---|---|---|---|---|---|---|---|---|---|---|---|---|
| | Tm1 | % CV | Tm1 | Tm2 | % CV | Tm2 | Tm3 | % CV | SD Tm3 | Tagg 266 | Tagg | 266 |
| Sample | (° C.) | Tm1 | (° C.) | (° C.) | Tm2 | (° C.) | (° C.) | Tm3 | (° C.) | (° C.) | 266 | (° C.) |
| PRNT2 | 64.6 | 1.04 | 0.67 | 74.1 | 0.61 | 0.45 | 82.5 | 0.8 | 0.66 | 64.22 | N/A | |
| MIAB121 | 70.9 | 0.3 | 0.21 | 80.1 | 0.39 | 0.31 | 85.3 | 0.52 | 0.44 | 69.5 | 0.91 | 0.63 |
| MIAB122 | 69.7 | 0.86 | 0.6 | 78.8 | 0.39 | 0.31 | 85 | 0.53 | 0.45 | 72.6 | 0.5 | 0.36 |
| MIAB123 | 70 | 1 | 0.7 | 80.2 | 0.74 | 0.59 | 86 | 0.38 | 0.33 | 65.6 | 2.41 | 1.58 |
| MIAB126 | 74.37 | 0.61 | 0.45 | 82.1 | 0.43 | 0.35 | 86.3 | 0.46 | 0.4 | 63.3 | 5.72 | 3.62 |
| MIAB205 | 71.5 | 0.7 | 0.5 | 80.7 | 0.69 | 0.56 | 85.9 | 0.52 | 0.45 | 78 | 0.59 | 0.46 |
| MIAB206 | 72.6 | 0.77 | 0.56 | 80.4 | 0.57 | 0.46 | 86.9 | 0.44 | 0.38 | 74.1 | 0.63 | 0.47 |
| MIAB207 | 70.6 | 0.99 | 0.7 | 78.6 | 0.27 | 0.21 | 85.9 | 0.91 | 0.78 | 71.4 | 0.91 | 0.65 |
| MIAB208 | 70.8 | 0.64 | 0.45 | 79 | 0.8 | 0.63 | 86.3 | 0.6 | 0.52 | 72.7 | 0.91 | 0.66 |

### Example 49. MIAB126 has Low Polyreactivity

[0856] Binding to baculoviral particles is another assay to measure polyreactivity. The experiment was conducted according to the standard protocol. BVP binding was calculated as OD fold change over background, and the data shows BVP binding of (OD fold over background) 4.01 at 500 nM, 2.18 at 250 nM, and AggScore of 74.8 for PRNT2; 3.34 at 500 nM, 1.85 at 250 nM, and AggScore of 92.4 for MIAB1; 3.77 at 500 nM, 2.05 at 250 nM, and AggScore of 98.4 for MIAB2; 3.78 at 500 nM, 1.67 at 250 nM, and AggScore of 114.3 for MIAB12; 3.86 at 500 nM, 1.92 at 250 nM, and AggScore of 181.5 for MIAB13; 4.22 at 500 nM, 1.85 at 250 nM, and AggScore of 129.5 for MIAB25; 4.35 at 500 nM, 1.88 at 250 nM, and AggScore of 108.4 for MIAB26; 4.25 at 500 nM, 2.17 at 250 nM, and AggScore of 85.9 for MIAB37; 4.85 at 500 nM, 2.34 at 250 nM, and AggScore of 137.6 for MIAB121; 4.32 at 500 nM, 1.94 at 250 nM, and AggScore of 105.5 for MIAB122; 4.70 at 500 nM, 2.27 at 250 nM, and AggScore of 80.8 for MIAB123; 5.08 at 500 nM, 1.72 at 250 nM, and AggScore of 108.1 for MIAB126; 5.05 at 500 nM, 2.09 at 250 nM, and AggScore of 107.2 for MIAB209; 4.08 at 500 nM, 2.28 at 250 nM, and AggScore of 100.4 for MIAB205; 5.04 at 500 nM, 2.46 at 250 nM, and AggScore of 106.6 for MIAB206; 5.32 at 500 nM, 2.34 at 250 nM, and AggScore of 114.5 for MIAB207; 5.70 at 500 nM, 2.47 at 250 nM, and AggScore of 111.9 for MIAB208; 9.55 at 500 nM, 5.05 at 250 nM, and AggScore of 204.3 for the positive control; and 1.53 at 500 nM, 2.14 at 250 nM, and AggScore of 50.1 for Nivolumab. MIAB126 does not bind BVP and has low polyreactivity.

### Example 50. MIAB126 HPLC Analytical SEC Indicated >90% POI

[0857] Analytical size exclusion chromatography conducted according to standard protocol showed single major peak at 280 nm illustrating an IgG with MW=150,000 Da.

### Example 51. MIAB126 has Expected Chain Compositions

[0858] To characterize the identity and composition of the samples, the samples were prepared and analyzed as described above. CE-SDS revealed PRNT2 (non-reduced) to comprise 96.4% intact antibody; PRNT2 (reduced) to comprise 26.6% light chain and 70.6% heavy chain; MIAB126 (non-reduced) to comprise 100% intact antibody; and MIAB126 (reduced with 1 M DTT) 29.2% light chain and 70.8% heavy chain. MIAB126 has expected chain compositions.

### Example 52. MAdCAM-IL-2 M Molecules Bind to Human or Murine MAdCAM

[0859] Parental CHO cells or CHO cells over-expressing human MAdCAM or murine MAdCAM were suspended in PBS+2% FBS media on a 96 well plate (Corning). Parental MAdCAM-IL-2 M bi-specifics PRNT2, or optimized variants MIAB1, MIAB12, MIAB13, MIAB25, MIAB26 or MIAB37 were captured for 30 mins on ice. After washing 2 times with PBS+2% FBS media, cells were stained for 30 minutes with an Anti-Human IgG detection antibody and TOPRO dye and acquired on an Attune NXT with plate loader. PRNT2 and MIAB197 bound to human MAdCAM with similar efficiency, and MIAB197 showed lower binding to murine MAdCAM than PRNT2. MAdCAM-IL-2 M bi-specifics bind to human or murine MAdCAM expressing cells and show minimum binding to parental CHO cells.

### Example 53. MAdCAM-IL-2 M Bi-Specifics Bind to Human or Murine MAdCAM Expressing Cells and Show Minimum Binding to Parental CHO Cells

[0860] Parental CHO cells or CHO cells over-expressing human MAdCAM or murine MAdCAM were suspended in PBS+2% FBS media on a 96 well plate (Corning). Parental IL-2 MM bi-specifics PRNT1 or PRNT2, or optimized variants MIAB197, MIAB1, MIAB12, MIAB13, MIAB25, MIAB26 or MIAB37 were captured for 30 mins on ice. After washing 2 times with PBS+2% FBS media, cells were stained for 30 minutes with an Anti-Human IgG detection antibody and TOPRO dye and acquired on an Attune NXT with plate loader. The data showed binding of PRNT2, MIAB1, MIAB12, MIAB13, MIAB25, MIAB26, and MIAB37 to human and murine MAdCAM. MIAB26 showed decreased binding to murine MAdCAM. MAdCAM-IL-2 M molecules bind to human and murine MAdCAM.

[0861] The disclosures of each and every patent, patent application, and publication cited herein are hereby incorporated herein by reference in their entirety. While various embodiments have been disclosed with reference to specific aspects, it is apparent that other aspects and variations of these embodiments may be devised by others skilled in the art without departing from the true spirit and scope of the embodiments. The appended claims are intended to be construed to include all such aspects and equivalent variations.

1. (canceled)

2. An antibody or antigen binding fragment thereof, comprising a heavy chain variable region and a light chain variable region, wherein the heavy chain variable region comprises a HCDR1 comprising the amino acid sequence of SEQ ID NO: 1499, a HCDR2 comprising the amino acid sequence of SEQ ID NO: 1506, and a HCDR3 comprising the amino acid sequence of SEQ ID NO: 1507, and wherein the light chain variable region comprises a LCDR1 comprising the amino acid sequence of SEQ ID NO: 1502, a LCDR2 comprising the amino acid sequence of SEQ ID NO: 1497, and a LCDR3 comprising the amino acid sequence of SEQ ID NO: 1498.

3-5. (canceled)

6. The antibody or antigen binding fragment of claim 2, wherein the heavy chain variable region comprises an amino acid sequence having at least 90% identity to the amino acid sequence of SEQ ID NO: 1445, 1477, or 1480 and the light chain variable region comprises an amino acid sequence having at least 90% identity to the amino acid sequence of SEQ ID NO: 1367.

7. The antibody or antigen binding fragment of claim 2, wherein the heavy chain variable region comprises an amino acid sequence having at least 90% identity to the amino acid sequence of SEQ ID NO: 1445 and the light chain variable region comprises an amino acid sequence having at least 90% identity to the amino acid sequence of SEQ ID NO: 1367.

8. The antibody or antigen binding fragment of claim 7, wherein the heavy chain variable region comprises the amino acid sequence of SEQ ID NO: 1445, and wherein the light chain variable region comprises the amino acid sequence of SEQ ID NO: 1367.

9-10. (canceled)

11. The antibody or antigen binding fragment of claim 7, wherein the heavy chain variable region and the light chain variable region are in a scFv format.

12. The antibody or antigen binding fragment of claim 7, wherein the heavy chain variable region and the light variable chain region are linked with a peptide linker.

13. The antibody or antigen binding fragment of claim 12, wherein the peptide linker is a glycine/serine linker.

14. The antibody or antigen binding fragment of claim 12, wherein the peptide linker comprises a sequence of GGGGSGGGGSGGGGSGGGGS (SEQ ID NO: 22), GGGGSGGGGSGGGGS (SEQ ID NO: 30), GGGGSGGGGS (SEQ ID NO: 619), GGGGS (SEQ ID NO: 23), or GGGSEGGGSEGGGSE (SEQ ID NO: 1546), or any combination thereof.

15. (canceled)

16. The antibody or antigen binding fragment of claim 7, wherein the antibody, or antigen binding fragment, binds to MAdCAM.

17. The antibody or antigen binding fragment of claim 7, wherein the antibody, or antigen binding fragment, is linked or associated with an effector molecule.

18. The antibody or antigen binding fragment of claim 17, wherein the effector molecule is a PD-1 agonist antibody, or antigen binding fragment thereof.

19-22. (canceled)

23. A pharmaceutical composition comprising the antibody, or antigen binding fragment of claim 7, and a pharmaceutically acceptable carrier.

24. A method of treating a subject with inflammatory bowel disease, the method comprising administering the antibody or antigen binding fragment of claim 7, or a pharmaceutical composition comprising the same, to the subject to treat the inflammatory bowel disease.

25. The method of claim 24, wherein the subject with inflammatory bowel disease has Crohn's disease, or ulcerative colitis.

26. A method of treating a subject with an auto-immune hepatitis, a primary sclerosing cholangitis, a Type 1 diabetes, a transplant, or a GVHD, the method comprising administering the antibody or antigen binding fragment of claim 7, or a pharmaceutical composition comprising the same, to the subject to treat the auto-immune hepatitis, the primary sclerosing cholangitis, the Type 1 diabetes, the transplant, or the GVHD.

27-30. (canceled)

31. A method of preventing an autoimmune disorder in a subject at risk for having the autoimmune disorder, the method comprising administering the antibody or antigen binding fragment of claim 7, or a pharmaceutical composition comprising the same, to the subject to prevent the autoimmune disorder.

The application's sequence listing, which the Patent Office published only in electronic form, follows.

SEQUENCE LISTING (1555 sequences)

SEQ ID NO: 1 - protein, 510 aa, Homo sapiens
MEDTKESNVKTFCSKNILAILGFSSIIAVIALLAVGLTQNKALPENVKYGIVLDAGSSHTSLYIYKWPAEKENDTGVVHQVEECRVKGPGISKFVQKVNEIGIYLTDCMERAREVIPRSQHQETPVYLGATAGMRLLRMESEELADRVLDVVERSLSNYPFDFQGARIITGQEEGAYGWITINYLLGKFSQKTRWFSIVPYETNNQETFGALDLGGASTQVTFVPQNQTIESPDNALQFRLYGKDYNVYTHSFLCYGKDQALWQKLAKDIQVASNEILRDPCFHPGYKKVVNVSDLYKTPCTKRFEMTLPFQQFEIQGIGNYQQCHQSILELFNTSYCPYSQCAFNGIFLPPLQGDFGAFSAFYFVMKFLNLTSEKVSQEKVTEMMKKFCAQPWEEIKTSYAGVKEKYLSEYCFSGTYILSLLLQGYHFTADSWEHIHFIGKIQGSDAGWTLGYMLNLTNMIPAEQPLSTPLSHSTYVFLMVLFSLVLFTVAIIGLLIFHKPSYFWKDMV

SEQ ID NO: 2 - protein, 574 aa, Homo sapiens [sequence omitted]

SEQ ID NO: 3 - protein, 290 aa, Artificial Sequence
  Description of Artificial Sequence: Synthetic polypeptide
MRIFAVFIFMTYWHLLNAFTVTVPKDLYVVEYGSNMTIECKFPVEKQLDLAALIVYWEMEDKNIIQFVHGEEDLKVQHSSYRQRARLLKDQLSLGNAALQITDVKLQDAGVYRCMISYGGADYKRITVKVNAPYNKINQRILVVDPVTSEHELTCQAEGYPKAEVIWTSSDHQVLSGKTTTTNSKREEKLFNVTSTLRINTTTNEIFYCTFRRLDPEENHTAELVIPELPLAHPPNERTHLVILGAILLCLGVALTFIFRLRKGRMMDVKKCGIQDTNSKKQSDTHLEET

SEQ ID NO: 4 - protein, 313 aa, Artificial Sequence
  Description of Artificial Sequence: Synthetic polypeptide
MVVMAPRTLFLLLSGALTLTETWAGSHSMRYFSAAVSRPGRGEPRFIAMGYVDDTQFVRFDSDSACPRMEPRAPWVEQEGPEYWEEETRNTKAHAQTDRMNLQTLRGYYNQSEASSHTLQWMIGCDLGSDGRLLRGYEQYAYDGKDYLALNEDLRSWTAADTAAQISKRKCEAANVAEQRRAYLEGTCVEWLHRYLENGKEMLQRADPPKTHVTHHPVFDYEATLRCWALGFYPAEIILTWQRDGEDQTQDVELVETRPAGDGTFQKWAAVVVPSGEEQRYTCHVQHEGLPEPLMLRWKQSSLPTIPIMGIVA

SEQ ID NO: 5 - protein, 338 aa, Artificial Sequence
  Description of Artificial Sequence: Synthetic polypeptide
MVVMAPRTLFLLLSGALTLTETWAGSHSMRYFSAAVSRPGRGEPRFIAMGYVDDTQFVRFDSDSACPRMEPRAPWVEQEGPEYWEEETRNTKAHAQTDRMNLQTLRGYYNQSEASSHTLQWMIGCDLGSDGRLLRGYEQYAYDGKDYLALNEDLRSWTAADTAAQISKRKCEAANVAEQRRAYLEGTCVEWLHRYLENGKEMLQRADPPKTHVTHHPVFDYEATLRCWALGFYPAEIILTWQRDGEDQTQDVELVETRPAGDGTFQKWAAVVVPSGEEQRYTCHVQHEGLPEPLMLRWKQSSLPTIPIMGIVAGLVVLAAVVTGAAVAAVLWRKKSSD

SEQ ID NO: 6 - protein, 133 aa, Artificial Sequence [sequence omitted]

SEQ ID NO: 7 - protein, 369 aa, Artificial Sequence
  Description of Artificial Sequence: Synthetic polypeptide
APTSSSTKKTQLQLEHLLLDLQMILNGINNYKNPKLTRMLTFKFYMPKKATELKHLQCLEEELKPLEEVLNLAQSKNFHLRPRDLISRINVIVLELKGSETTFMCEYADETATIVEFLNRWITFSQSIISTLTGGGGAGGGGDKTHTCPPCPAPELLGGPSVFLFPPKPKDTLMISRTPEVTCVVVDVSHEDPEVKFNWYVDGVEVHNAKTKPREEQYASTYRVVSVLTVLHQDWLNGKEYKCKVSNKALPAPIEKTISKAKGQPREPQVYTLPPSRDELTKNQVSLTCLVKGFYPSDIAVEWESNGQPENNYKTTPPVLDSDGSFFLYSKLTVDKSRWQQGNVFSCSVMHEALHNHYTQKSLSLSPGK

SEQ ID NO: 8 - protein, 356 aa, Artificial Sequence
  Description of Artificial Sequence: Synthetic polypeptide
APTSSSTKKTQLQLEHLLLHLQMILNGINNYKNPKLTRMLTFKFYMPKKATELKHLQCLEEELKPLEEVLNLAQSKNFHLRPRDLISNINVIVLELKGSETTFMCEYADETATIVEFLNRWITFSQSIISTLTVECPPCPAPPVAGPSVFLFPPKPKDTLMISRTPEVTCVVVDVSHEDPEVQFNWYVDGVEVHNAKTKPREEQFNSTFRVVSVLTVVHQDWLNGKEYKCKVSNKGLPAPIEKTISKTKGQPREPQVYTLPPSREEMTKNQVSLTCLVKGFYPSDIAVEWESNGQPENNYKTTPPMLDSDGSFFLYSKLTVDKSRWQQGNVFSCSVMHEALHNHYTQKSLSLSPGK

SEQ ID NO: 9 - protein, 359 aa, Artificial Sequence
  Description of Artificial Sequence: Synthetic polypeptide
APTSSSTKKTQLQLEHLLLDLQMILNGINNYKNPKLTRMLTFKFYMPKKATELKHLQCLEEELKPLEEVLNLAQSKNFHLRPRDLISRINVIVLELKGSETTFMCEYADETATIVEFLNRWITFSQSIISTLTDKTHTCPPCPAPELLGGPSVFLFPPKPKDTLMISRTPEVTCVVVDVSHEDPEVKFNWYVDGVEVHNAKTKPREEQYASTYRVVSVLTVLHQDWLNGKEYKCKVSNKALPAPIEKTISKAKGQPREPQVYTLPPSRDELTKNQVSLTCLVKGFYPSDIAVEWESNGQPENNYKTTPPVLDSDGSFFLYSKLTVDKSRWQQGNVFSCSVMHEALHNHYTQKSLSLSPG

SEQ ID NO: 10 - protein, 364 aa, Artificial Sequence
  Description of Artificial Sequence: Synthetic polypeptide
APTSSSTKKTQLQLEHLLLDLQMILNGINNYKNPKLTRMLTFKFYMPKKATELKHLQCLEEELKPLEEVLNLAQSKNFHLRPRDLISRINVIVLELKGSETTFMCEYADETATIVEFLNRWITFSQSIISTLTGGGGSDKTHTCPPCPAPELLGGPSVFLFPPKPKDTLMISRTPEVTCVVVDVSHEDPEVKFNWYVDGVEVHNAKTKPREEQYASTYRVVSVLTVLHQDWLNGKEYKCKVSNKALPAPIEKTISKAKGQPREPQVYTLPPSRDELTKNQVSLTCLVKGFYPSDIAVEWESNGQPENNYKTTPPVLDSDGSFFLYSKLTVDKSRWQQGNVFSCSVMHEALHNHYTQKSLSLSPG

SEQ ID NO: 11 - protein, 369 aa, Artificial Sequence
  Description of Artificial Sequence: Synthetic polypeptide
APTSSSTKKTQLQLEHLLLDLQMILNGINNYKNPKLTRMLTFKFYMPKKATELKHLQCLEEELKPLEEVLNLAQSKNFHLRPRDLISRINVIVLELKGSETTFMCEYADETATIVEFLNRWITFSQSIISTLTGGGGSGGGGSDKTHTCPPCPAPELLGGPSVFLFPPKPKDTLMISRTPEVTCVVVDVSHEDPEVKFNWYVDGVEVHNAKTKPREEQYASTYRVVSVLTVLHQDWLNGKEYKCKVSNKALPAPIEKTISKAKGQPREPQVYTLPPSRDELTKNQVSLTCLVKGFYPSDIAVEWESNGQPENNYKTTPPVLDSDGSFFLYSKLTVDKSRWQQGNVFSCSVMHEALHNHYTQKSLSLSPG

SEQ ID NO: 12 - protein, 374 aa, Artificial Sequence
  Description of Artificial Sequence: Synthetic polypeptide
APTSSSTKKTQLQLEHLLLDLQMILNGINNYKNPKLTRMLTFKFYMPKKATELKHLQCLEEELKPLEEVLNLAQSKNFHLRPRDLISRINVIVLELKGSETTFMCEYADETATIVEFLNRWITFSQSIISTLTGGGGSGGGGSGGGGSDKTHTCPPCPAPELLGGPSVFLFPPKPKDTLMISRTPEVTCVVVDVSHEDPEVKFNWYVDGVEVHNAKTKPREEQYASTYRVVSVLTVLHQDWLNGKEYKCKVSNKALPAPIEKTISKAKGQPREPQVYTLPPSRDELTKNQVSLTCLVKGFYPSDIAVEWESNGQPENNYKTTPPVLDSDGSFFLYSKLTVDKSRWQQGNVFSCSVMHEALHNYHTQKSLSLSPG

SEQ ID NO: 13 - protein, 379 aa, Artificial Sequence
  Description of Artificial Sequence: Synthetic polypeptide
APTSSSTKKTQLQLEHLLLDLQMILNGINNYKNPKLTRMLTFKFYMPKKATELKHLQCLEEELKPLEEVLNLAQSKNFHLRPRDLISRINVIVLELKGSETTFMCEYADETATIVEFLNRWITFSQSIISTLTGGGGSGGGGSGGGGSGGGGSDKTHTCPPCPAPELLGGPSVFLFPPKPKDTLMISRTPEVTCVVVDVSHEDPEVKFNWYVDGVEVHNAKTKPREEQYASTYRVVSVLTVLHQDWLNGKEYKCKVSNKALPAPIEKTISKAKGQPREPQVYTLPPSRDELTKNQVSLTCLVKGFYPSDIAVEWESNGQPENNYKTTPPVLDSDGSFFLYSKLTVDKSRWQQGNVFSCSVMHEALHNHYTQKSLSLSPG

SEQ ID NO: 14 - protein, 374 aa, Artificial Sequence
  Description of Artificial Sequence: Synthetic polypeptide
APTSSSTKKTQLQLEHLLLHLQMILNGINNYKNPKLTRMLTFKFYMPKKATELKHLQCLEEELKPLEEVLNLAQSKNFHLRPRDLISNINVIVLELKGSETTFMCEYADETATIVEFLNRWITFSQSIISTLTGGGGSGGGGSGGGGSDKTHTCPPCPAPELLGGPSVFLFPPKPKDTLMISRTPEVTCVVVDVSHEDPEVKFNWYVDGVEVHNAKTKPREEQYASTYPVVSVLTVLHQDWLNGKEYKCKVSNKALPAPIEKTISKAKGQPREPQVYTLPPSRDELTKNQVSLTCLVKGFYPSDIAVEWESNGQPENNYKTTPPVLDSDGSFFLYSKLTVDKSRWQQGNVFSCSVMHEALHNHYTQKSLSLSPG

SEQ ID NO: 15 - protein, 153 aa, Artificial Sequence
  Description of Artificial Sequence: Synthetic polypeptide
MYRMQLLSCIALSLALVTNSAPTSSSTKKTQLQLEHLLLDLQMILNGINNYKNPKLTRMLTFKFYMPKKATELKHLQCLEEELKPLEEVLNLAQSKNFHLRPRDLISNINVIVLELKGSETTFMCEYADETATIVEFLNRWITFCQSIISTLT

SEQ ID NO: 16 - protein, 153 aa, Artificial Sequence
  Description of Artificial Sequence: Synthetic polypeptide
MYRMQLLSCIALSLALVTNSAPTSSSTKKTQLQLEHLLLDLQMILNGISNHKNPRLARMLTFKFYMPEKATEIKHLQCLEEELKPLEEALRLAPSKNFHLRPRDLISDINVIVLELKGSETTFMCEYADETATIVEFLNRWITFSQSIISTLT

SEQ ID NO: 17 - protein, 153 aa, Artificial Sequence
  Description of Artificial Sequence: Synthetic polypeptide
MYRMQLLSCIALSLALVTNSAPTSSSTKKTQLQLEHLLLDLQMILNGISNHKNPRLARMLTFKFYMPEKATELKHIQCLEEELKPLEEALRLAPSKNFHLRPRDLISDINVIVLELKGSETTFMCEYADETATIVEFLNRWITFSQSIISTLT

SEQ ID NO: 18 - protein, 153 aa, Artificial Sequence
  Description of Artificial Sequence: Synthetic polypeptide
MYRMQLLSCIALSLALVTNSAPTSSSTKKTQLQLEHLLLDLQMILNGISNHKNPRLARMLTFKFYMPEKATELKHLQCLEEELKPLEEALRLAPSKNFHIRPRDLISDINVIVLELKGSETTFMCEYADETATIVEFLNRWITFSQSIISTLT

SEQ ID NO: 19 - protein, 153 aa, Artificial Sequence
  Description of Artificial Sequence: Synthetic polypeptide
MYRMQLLSCIALSLALVTNSAPTSSSTKKTQLQLEHLLLDLQMILNGISNHKNPRLARMLTFKFYMPEKATELKHLQCLEEELKPLEEALRLAPSKNFHLRPRDLISDINVIVLELKGSETTFMCEYADETATIVEFINRWITFSQSIISTLT

SEQ ID NO: 20 - protein, 20 aa, Artificial Sequence
  Description of Artificial Sequence: Synthetic peptide
MYRMQLLSCIALSLALVTNS

SEQ ID NO: 21 - protein, 226 aa, Artificial Sequence
  Description of Artificial Sequence: Synthetic polypeptide
DKTHTCPPCPAPEAAGAPSVFLFPPKPKDTLMISRTPEVTCVVVDVSHEDPEVKFNWYVDGVEVHNAKTKPREEQYNSTYRVVSVLTVLHQDWLNGKEYKCKVSNKALPAPIEKTISKAKGQPREPQVYTLPPSREEMTKNQVSLTCLVKGFYPSDIAVEWESNGQPENNYKTTPPVLDSDGSFFLYSKLTVDKSRWQQGNVFSCSVMHEALHNHYTQKSLSLSPG

SEQ ID NO: 22 - protein, 20 aa, Artificial Sequence
  Description of Artificial Sequence: Synthetic peptide
GGGGSGGGGSGGGGSGGGGS

SEQ ID NO: 23 - protein, 5 aa, Artificial Sequence
  Description of Artificial Sequence: Synthetic peptide
GGGGS

SEQ ID NO: 24 - protein, 399 aa, Artificial Sequence
  Description of Artificial Sequence: Synthetic polypeptide
MYRMQLLSCIALSLALVTNSAPTSSSTKKTQLQLEHLLLDLQMILNGISNHKNPRLARMLTFKFYMPEKATEIKHLQCLEEELKPLEEALRLAPSKNFHLRPRDLISDINVIVLELKGSETTFMCEYADETATIVEFLNRWITFSQSIISTLTGGGGSGGGGSGGGGSGGGGSDKTHTCPPCPAPEAAGAPSVFLFPPKPKDTLMISRTPEVTCVVVDVSHEDPEVKFNWYVDGVEVHNAKTKPREEQYNSTYRVVSVLTVLHQDWLNGKEYKCKVSNKALPAPIEKTISKAKGQPREPQVYTLPPSREEMTKNQVSLTCLVKGFYPSDIAVEWESNGQPENNYKTTPPVLDSDGSFFLYSKLTVDKSRWQQGNVFSCSVMHEALHNHYTQKSLSLSPG

SEQ ID NO: 25 - protein, 399 aa, Artificial Sequence
  Description of Artificial Sequence: Synthetic polypeptide
MYRMQLLSCIALSLALVTNSAPTSSSTKKTQLQLEHLLLDLQMILNGISNHKNPRLARMLTFKFYMPEKATELKHIQCLEEELKPLEEALRLAPSKNFHLRPRDLISDINVIVLELKGSETTFMCEYADETATIVEFLNRWITFSQSIISTLTGGGGSGGGGSGGGGSGGGGSDKTHTCPPCPAPEAAGAPSVFLFPPKPKDTLMISRTPEVTCVVVDVSHEDPEVKFNWYVDGVEVHNAKTKPREEQYNSTYRVVSVLTVLHQDWLNGKEYKCKVSNKALPAPIEKTISKAKGQPREPQVYTLPPSREEMTKNQVSLTCLVKGFYPSDIAVEWESNGQPENNYKTTPPVLDSDGSFFLYSKLTVDKSRWQQGNVFSCSVMHEALHNHYTQKSLSLSPG

SEQ ID NO: 26 - protein, 399 aa, Artificial Sequence
  Description of Artificial Sequence: Synthetic polypeptide
MYRMQLLSCIALSLALVTNSAPTSSSTKKTQLQLEHLLLDLQMILNGISNHKNPRLARMLTFKFYMPEKATELKHLQCLEEELKPLEEALRLAPSKNFHIRPRDLISDINVIVLELKGSETTFMCEYADETATIVEFLNRWITFSQSIISTLTGGGGSGGGGSGGGGSGGGGSDKTHTCPPCPAPEAAGAPSVFLFPPKPKDTLMISRTPEVTCVVVDVSHEDPEVKFNWYVDGVEVHNAKTKPREEQYNSTYRVVSVLTVLHQDWLNGKEYKCKVSNKALPAPIEKTISKAKGQPREPQVYTLPPSREEMTKNQVSLTCLVKGFYPSDIAVEWESNGQPENNYKTTPPVLDSDGSFFLYSKLTVDKSRWQQGNVFSCSVMHEALHNHYTQKSLSLSPG

SEQ ID NO: 27 - protein, 399 aa, Artificial Sequence
  Description of Artificial Sequence: Synthetic polypeptide
MYRMQLLSCIALSLALVTNSAPTSSSTKKTQLQLEHLLLDLQMILNGISNHKNPRLARMLTFKFYMPEKATELKHLQCLEEELKPLEEALRLAPSKNFHLRPRDLISDINVIVLELKGSETTFMCEYADETATIVEFINRWITFSQSIISTLTGGGGSGGGGSGGGGSGGGGSDKTHTCPPCPAPEAAGAPSVFLFPPKPKDTLMISRTPEVTCVVVDVSHEDPEVKFNWYVDGVEVHNAKTKPREEQYNSTYRVVSVLTVLHQDWLNGKEYKCKVSNKALPAPIEKTISKAKGQPREPQVYTLPPSREEMTKNQVSLTCLVKGFYPSDIAVEWESNGQPENNYKTTPPVLDSDGSFFLYSKLTVDKSRWQQGNVFSCSVMHEALHNHYTQKSLSLSPG

SEQ ID NO: 28 - protein, 226 aa, Artificial Sequence
  Description of Artificial Sequence: Synthetic polypeptide
DKTHTCPPCPAPELLGGPSVFLFPPKPKDTLMISRTPEVTCVVVDVSHEDPEVKFNWYVDGVEVHNAKTKPREEQYNSTYRVVSVLTVLHQDWLNGKEYKCKVSNKALPAPIEKTISKAKGQPREPQVYTLPPSREEMTKNQVSLTCLVKGFYPSDIAVEWESNGQPENNYKTTPPVLDSDGSFFLYSKLTVDKSRWQQGNVFSCSVMHEALHNHYTQKSLSLSPG

SEQ ID NO: 29 - protein, 5 aa, Artificial Sequence
  Description of Artificial Sequence: Synthetic peptide
GGGGA

SEQ ID NO: 30 - protein, 15 aa, Artificial Sequence
  Description of Artificial Sequence: Synthetic peptide
GGGGSGGGGSGGGGS

SEQ ID NO: 31 - protein, 133 aa, Artificial Sequence
  Description of Artificial Sequence: Synthetic polypeptide
APTSSSTKKTQLQLEHLLLDLQMILNGINNYKNPKLTRMLTFKFYMPKKATELKHLQCLEEELKPLEEVLNLAQSKNFHLRPRDLISNINVIVLELKGSETTFMCEYADETATIVEFLNRWITFSQSIISTLT

SEQ ID NO: 32 - protein, 133 aa, Artificial Sequence
  Description of Artificial Sequence: Synthetic polypeptide
APASSSTKKTQLQLEHLLLDLQMILNGINNYKNPKLTRMLTFKFYMPKKATELKHLQCLEEELKPLEEVLNLAQSKNFHLRPRDLISNINVIVLELKGSETTFMCEYADETATIVEFLNRWITFSQSIISTLT

SEQ ID NO: 33 - protein, 133 aa, Artificial Sequence
  Description of Artificial Sequence: Synthetic polypeptide
APTSSSTKKTQLQLEHLLLDLQMILNGINNYKNPKLTRMLTFKFYMPKKATELKHLQCLEEELKPLEEVLNLAQSKNFHLRPRDLISRINVIVLELKGSETTFMCEYADETATIVEFLNRWITFSQSIISTLT

SEQ ID NO: 34 - protein, 133 aa, Artificial Sequence [sequence omitted]

SEQ ID NO: 35 - protein, 133 aa, Artificial Sequence
  Description of Artificial Sequence: Synthetic polypeptide
APTSSSTKKTQLQLEHLLLDLQMILNGINNYKNPKLTRMLTFKFYMPKKATELKHLQCLEEELKPLEEALNLAPSKNFHLRPRDLISDINVIVLELKGSETTFMCEYADETATIVEFLNRWITFSQSIISTLT

SEQ ID NO: 36 - protein, 133 aa, Artificial Sequence
  Description of Artificial Sequence: Synthetic polypeptide
APTSSSTKKTQLQLEHLLLDLQMILNGINNYKNPKLTRMLTFKFYMPKKATELKHLQCLEEELKPLEEALNLAPSKNFHLRPRDLISRINVIVLELKGSETTFMCEYADETATIVEFLNRWITFSQSIISTLT

SEQ ID NO: 37 - protein, 133 aa, Artificial Sequence
  Description of Artificial Sequence: Synthetic polypeptide
APTSSSTKKTQLQLEHLLLDLQMILNGINNYKNPKLTRMLTFKFYMPKKATELKHLQCLEEELKPLEEVLNLAQSKNFHLRPRDLISDINVIVLELKGSETTFMCEYADETATIVEFLNRWITFSQSIISTLT

SEQ ID NO: 38 - protein, 133 aa, Artificial Sequence
  Description of Artificial Sequence: Synthetic polypeptide
APTSSSTKKTQLQLEHLLLDLQMILNGINNYKNPKLTRMLTFKFYMPKKATEIKHLQCLEEELKPLEEALNLAPSKNFHLRPRDLISDINVIVLELKGSETTFMCEYADETATIVEFLNRWITFSQSIISTLT

SEQ ID NO: 39 - protein, 133 aa, Artificial Sequence
  Description of Artificial Sequence: Synthetic polypeptide
APTSSSTKKTQLQLEHLLLDLQMILNGINNYKNPKLTRMLTFKFYMPKKATELKHIQCLEEELKPLEEALNLAPSKNFHLRPRDLISDINVIVLELKGSETTFMCEYADETATIVEFLNRWITFSQSIISTLT

SEQ ID NO: 40 - protein, 133 aa, Artificial Sequence
  Description of Artificial Sequence: Synthetic polypeptide
APTSSSTKKTQLQLEHLLLDLQMILNGINNYKNPKLTRMLTFKFYMPKKATELKHLQCLEEELKPLEEALNLAPSKNFHIRPRDLISDINVIVLELKGSETTFMCEYADETATIVEFLNRWITFSQSIISTLT

SEQ ID NO: 41 - protein, 133 aa, Artificial Sequence
  Description of Artificial Sequence: Synthetic polypeptide
APTSSSTKKTQLQLEHLLLDLQMILNGINNYKNPKLTRMLTFKFYMPKKATELKHLQCLEEELKPLEEALNLAPSKNFHLRPRDLISDINVIVLELKGSETTFMCEYADETATIVEFINRWITFSQSIISTLT

SEQ ID NO: 42 - protein, 585 aa, Artificial Sequence [sequence omitted]

SEQ ID NO: 43 - protein, 226 aa, Artificial Sequence
  Description of Artificial Sequence: Synthetic polypeptide
DKTHTCPPCPAPELLGGPSVFLFPPKPKDTLMISRTPEVTCVVVDVSHEDPEVKFNWYVDGVEVHNAKTKPREEQYGSTYRVVSVLTVLHQDWLNGKEYKCKVSNKALPAPIEKTISKAKGQPREPQVYTLPPSREEMTKNQVSLTCLVKGFYPSDIAVEWESNGQPENNYKTTPPVLDSDGSFFLYSKLTVDKSRWQQGNVFSCSVMHEALHNHYTQKSLSLSPG

SEQ ID NO: 44 - protein, 329 aa, Artificial Sequence
  Description of Artificial Sequence: Synthetic polypeptide
ASTKGPSVFPLAPSSKSTSGGTAALGCLVKDYFPEPVTVSWNSGALTSGVHTFPAVLQSSGLYSLSSVVTVPSSSLGTQTYICNVNHKPSNTKVDKKVEPKSCDKTHTCPPCPAPEAAGAPSVFLFPPKPKDTLMISRTPEVTCVVVDVSHEDPEVKFNWYVDGVEVHNAKTKPREEQYNSTYRVVSVLTVLHQDWLNGKEYKCKVSNKALPAPIEKTISKAKGQPREPQVYTLPPSREEMTKNQVSLTCLVKGFYPSDIAVEWESNGQPENNYKTTPPVLDSDGSFFLYSKLTVDKSRWQQGNVFSCSVMHEALHNHYTQKSLSLSPG

SEQ ID NO: 45 - protein, 107 aa, Artificial Sequence [sequence omitted]

SEQ ID NO: 46 - protein, 374 aa, Artificial Sequence
  Description of Artificial Sequence: Synthetic polypeptide
APTSSSTKKTQLQLEHLLLDLQMILNGINNYKNPKLTRMLTFKFYMPKKATELKHLQCLEEELKPLEEVLNLAQSKNFHLRPRDLISNINVIVLELKGSETTFMCEYADETATIVEFLNRWITFSQSIISTLTGGGGSGGGGSGGGGSDKTHTCPPCPAPEAAGAPSVFLFPPKPKDTLMISRTPEVTCVVVDVSHEDPEVKFNWYVDGVEVHNAKTKPREEQYNSTYRVVSVLTVLHQDWLNGKEYKCKVSNKALPAPIEKTISKAKGQPREPQVYTLPPSREEMTKNQVSLTCLVKGFYPSDIAVEWESNGQPENNYKTTPPVLDSDGSFFLYSKLTVDKSRWQQGNVFSCSVMHEALHNHYTQKSLSLSPG

SEQ ID NO: 47 - protein, 374 aa, Artificial Sequence
  Description of Artificial Sequence: Synthetic polypeptide
APASSSTKKTQLQLEHLLLDLQMILNGINNYKNPKLTRMLTFKFYMPKKATELKHLQCLEEELKPLEEVLNLAQSKNFHLRPRDLISNINVIVLELKGSETTFMCEYADETATIVEFLNRWITFSQSIISTLTGGGGSGGGGSGGGGSDKTHTCPPCPAPEAAGAPSVFLFPPKPKDTLMISRTPEVTCVVVDVSHEDPEVKFNWYVDGVEVHNAKTKPREEQYNSTYRVVSVLTVLHQDWLNGKEYKCKVSNKALPAPIEKTISKAKGQPREPQVYTLPPSREEMTKNQVSLTCLVKGFYPSDIAVEWESNGQPENNYKTTPPVLDSDGSFFLYSKLTVDKSRWQQGNVFSCSVMHEALHNHYTQKSLSLSPG

SEQ ID NO: 48 - protein, 374 aa, Artificial Sequence
  Description of Artificial Sequence: Synthetic polypeptide
APTSSSTKKTQLQLEHLLLDLQMILNGINNYKNPKLTRMLTFKFYMPKKATELKHLQCLEEELKPLEEVLNLAQSKNFHLRPRDLISRINVIVLELKGSETTFMCEYADETATIVEFLNRWITFSQSIISTLTGGGGSGGGGSGGGGSDKTHTCPPCPAPEAAGAPSVFLFPPKPKDTLMISRTPEVTCVVVDVSHEDPEVKFNWYVDGVEVHNAKTKPREEQYNSTYRVVSVLTVLHQDWLNGKEYKCKVSNKALPAPIEKTISKAKGQPREPQVYTLPPSREEMTKNQVSLTCLVKGFYPSDIAVEWESNGQPENNYKTTPPVLDSDGSFFLYSKLTVDKSRWQQGNVFSCSVMHEALHNHYTQKSLSLSPG

SEQ ID NO: 49 - protein, 374 aa, Artificial Sequence
  Description of Artificial Sequence: Synthetic polypeptide
APTSSSTKKTQLQLEHLLLDLQMILNGINNYKNPKLTRMLTFKFYMPKKATELKHLQCLEEELKPLEEALNLAPSKNFHLRPRDLISNINVIVLELKGSETTFMCEYADETATIVEFLNRWITFSQSIISTLTGGGGSGGGGSGGGGSDKTHTCPPCPAPEAAGAPSVFLFPPKPKDTLMISRTPEVTCVVVDVSHEDPEVKFNWYVDGVEVHNAKTKPREEQYNSTYRVVSVLTVLHQDWLNGKEYKCKVSNKALPAPIEKTISKAKGQPREPQVYTLPPSREEMTKNQVSLTCLVKGFYPSDIAVEWESNGQPENNYKTTPPVLDSDGSFFLYSKLTVDKSRWQQGNVFSCSVMHEALHNHYTQKSLSLSPG

SEQ ID NO: 50 - protein, 374 aa, Artificial Sequence
  Description of Artificial Sequence: Synthetic polypeptide
APTSSSTKKTQLQLEHLLLDLQMILNGINNYKNPKLTRMLTFKFYMPKKATELKHLQCLEEELKPLEEALNLAPSKNFHLRPRDLISDINVIVLELKGSETTFMCEYADETATIVEFLNRWITFSQSIISTLTGGGGSGGGGSGGGGSDKTHTCPPCPAPEAAGAPSVFLFPPKPKDTLMISRTPEVTCVVVDVSHEDPEVKFNWYVDGVEVHNAKTKPREEQYNSTYRVVSVLTVLHQDWLNGKEYKCKVSNKALPAPIEKTISKAKGQPREPQVYTLPPSREEMTKNQVSLTCLVKGFYPSDIAVEWESNGQPENNYKTTPPVLDSDGSFFLYSKLTVDKSRWQQGNVFSCSVMHEALHNHYTQKSLSLSPG

SEQ ID NO: 51 - protein, 374 aa, Artificial Sequence
  Description of Artificial Sequence: Synthetic polypeptide
APTSSSTKKTQLQLEHLLLDLQMILNGINNYKNPKLTRMLTFKFYMPKKATELKHLQCLEEELKPLEEALNLAPSKNFHLRPRDLISRINVIVLELKGSETTFMCEYADETATIVEFLNRWITFSQSIISTLTGGGGSGGGGSGGGGSDKTHTCPPCPAPEAAGAPSVFLFPPKPKDTLMISRTPEVTCVVVDVSHEDPEVKFNWYVDGVEVHNAKTKPREEQYNSTYRVVSVLTVLHQDWLNGKEYKCKVSNKALPAPIEKTISKAKGQPREPQVYTLPPSREEMTKNQVSLTCLVKGFYPSDIAVEWESNGQPENNYKTTPPVLDSDGSFFLYSKLTVDKSRWQQGNVFSCSVMHEALHNHYTQKSLSLSPG

SEQ ID NO: 52 - protein, 374 aa, Artificial Sequence
  Description of Artificial Sequence: Synthetic polypeptide
APTSSSTKKTQLQLEHLLLDLQMILNGINNYKNPKLTRMLTFKFYMPKKATELKHLQCLEEELKPLEEVLNLAQSKNFHLRPRDLISDINVIVLELKGSETTFMCEYADETATIVEFLNRWITFSQSIISTLTGGGGSGGGGSGGGGSDKTHTCPPCPAPEAAGAPSVFLFPPKPKDTLMISRTPEVTCVVVDVSHEDPEVKFNWYVDGVEVHNAKTKPREEQYNSTYRVVSVLTVLHQDWLNGKEYKCKVSNKALPAPIEKTISKAKGQPREPQVYTLPPSREEMTKNQVSLTCLVKGFYPSDIAVEWESNGQPENNYKTTPPVLDSDGSFFLYSKLTVDKSRWQQGNVFSCSVMHEALHNHYTQKSLSLSPG

SEQ ID NO: 53 - protein, 379 aa, Artificial Sequence
  Description of Artificial Sequence: Synthetic polypeptide
APTSSSTKKTQLQLEHLLLDLQMILNGINNYKNPKLTRMLTFKFYMPKKATEIKHLQCLEEELKPLEEALNLAPSKNFHLRPRDLISDINVIVLELKGSETTFMCEYADETATIVEFLNRWITFSQSIISTLTGGGGSGGGGSGGGGSGGGGSDKTHTCPPCPAPEAAGAPSVFLFPPKPKDTLMISRTPEVTCVVVDVSHEDPEVKFNWYVDGVEVHNAKTKPREEQYNSTYRVVSVLTVLHQDWLNGKEYKCKVSNKALPAPIEKTISKAKGQPREPQVYTLPPSREEMTKNQVSLTCLVKGFYPSDIAVEWESNGQPENNYKTTPPVLDSDGSFFLYSKLTVDKSRWQQGNVFSCSVMHEALHNHYTQKSLSLSPG

SEQ ID NO: 54 - protein, 379 aa, Artificial Sequence
  Description of Artificial Sequence: Synthetic polypeptide
APTSSSTKKTQLQLEHLLLDLQMILNGINNYKNPKLTRMLTFKFYMPKKATELKHIQCLEEELKPLEEALNLAPSKNFHLRPRDLISDINVIVLELKGSETTFMCEYADETATIVEFLNRWITFSQSIISTLTGGGGSGGGGSGGGGSGGGGSDKTHTCPPCPAPEAAGAPSVFLFPPKPKDTLMISRTPEVTCVVVDVSHEDPEVKFNWYVDGVEVHNAKTKPREEQYNSTYRVVSVLTVLHQDWLNGKEYKCKVSNKALPAPIEKTISKAKGQPREPQVYTLPPSREEMTKNQVSLTCLVKGFYPSDIAVEWESNGQPENNYKTTPPVLDSDGSFFLYSKLTVDKSRWQQGNVFSCSVMHEALHNHYTQKSLSLSPG

SEQ ID NO: 55 - protein, 379 aa, Artificial Sequence
  Description of Artificial Sequence: Synthetic polypeptide
APTSSSTKKTQLQLEHLLLDLQMILNGINNYKNPKLTRMLTFKFYMPKKATELKHLQCLEEELKPLEEALNLAPSKNFHIRPRDLISDINVIVLELKGSETTFMCEYADETATIVEFLNRWITFSQSIISTLTGGGGSGGGGSGGGGSGGGGSDKTHTCPPCPAPEAAGAPSVFLFPPKPKDTLMISRTPEVTCVVVDVSHEDPEVKFNWYVDGVEVHNAKTKPREEQYNSTYRVVSVLTVLHQDWLNGKEYKCKVSNKALPAPIEKTISKAKGQPREPQVYTLPPSREEMTKNQVSLTCLVKGFYPSDIAVEWESNGQPENNYKTTPPVLDSDGSFFLYSKLTVDKSRWQQGNVFSCSVMHEALHNHYTQKSLSLSPG

SEQ ID NO: 56 - protein, 379 aa, Artificial Sequence
  Description of Artificial Sequence: Synthetic polypeptide
APTSSSTKKTQLQLEHLLLDLQMILNGINNYKNPKLTRMLTFKFYMPKKATELKHLQCLEEELKPLEEALNLAPSKNFHLRPRDLISDINVIVLELKGSETTFMCEYADETATIVEFINRWITFSQSIISTLTGGGGSGGGGSGGGGSGGGGSDKTHTCPPCPAPEAAGAPSVFLFPPKPKDTLMISRTPEVTCVVVDVSHEDPEVKFNWYVDGVEVHNAKTKPREEQYNSTYRVVSVLTVLHQDWLNGKEYKCKVSNKALPAPIEKTISKAKGQPREPQVYTLPPSREEMTKNQVSLTCLVKGFYPSDIAVEWESNGQPENNYKTTPPVLDSDGSFFLYSKLTVDKSRWQQGNVFSCSVMHEALHNHYTQKSLSLSPG

SEQ ID NO: 57 - protein, 379 aa, Artificial Sequence
  Description of Artificial Sequence: Synthetic polypeptide
APTSSSTKKTQLQLEHLLLDLQMILNGINNYKNPKLTRMLTFKFYMPKKATELKHLQCLEEELKPLEEALNLAPSKNFHLRPRDLISDINVIVLELKGSETTFMCEYADETATIVEFLNRWITFSQSIISTLTGGGGSGGGGSGGGGSGGGGSDKTHTCPPCPAPEAAGAPSVFLFPPKPKDTLMISRTPEVTCVVVDVSHEDPEVKFNWYVDGVEVHNAKTKPREEQYNSTYRVVSVLTVLHQDWLNGKEYKCKVSNKALPAPIEKTISKAKGQPREPQVYTLPPSREEMTKNQVSLTCLVKGFYPSDIAVEWESNGQPENNYKTTPPVLDSDGSFFLYSKLTVDKSRWQQGNVFSCSVMHEALHNHYTQKSLSLSPG

SEQ ID NO: 58 - protein, 364 aa, Artificial Sequence
  Description of Artificial Sequence: Synthetic polypeptide
DKTHTCPPCPAPELLGGPSVFLFPPKPKDTLMISRTPEVTCVVVDVSHEDPEVKFNWYVDGVEVHNAKTKPREEQYGSTYRVVSVLTVLHQDWLNGKEYKCKVSNKALPAPIEKTISKAKGQPREPQVYTLPPSREEMTKNQVSLTCLVKGFYPSDIAVEWESNGQPENNYKTTPPVLDSDGSFFLYSKLTVDKSRWQQGNVFSCSVMHEALHNHYTQKSLSLSPGGGGGSAPTSSSTKKTQLQLEHLLLDLQMILNGINNYKNPKLTRMLTFKFYMPKKATELKHLQCLEEELKPLEEALNLAPSKNFHLRPRDLISDINVIVLELKGSETTFMCEYADETATIVEFLNRWITFAQSIISTLT

SEQ ID NO: 59 - protein, 379 aa, Artificial Sequence
  Description of Artificial Sequence: Synthetic polypeptide
  MOD_RES (53)..(53): L or I
  MOD_RES (56)..(56): L or I
  MOD_RES (80)..(80): L or I
  MOD_RES (118)..(118): L or I
  See specification as filed for detailed description of substitutions and preferred embodiments
APTSSSTKKTQLQLEHLLLDLQMILNGINNYKNPKLTRMLTFKFYMPKKATEXKHXQCLEEELKPLEEALNLAPSKNFHXRPRDLISDINVIVLELKGSETTFMCEYADETATIVEFXNRWITFSQSIISTLTGGGGSGGGGSGGGGSGGGGSDKTHTCPPCPAPEAAGAPSVFLFPPKPKDTLMISRTPEVTCVVVDVSHEDPEVKFNWYVDGVEVHNAKTKPREEQYNSTYRVVSVLTVLHQDWLNGKEYKCKVSNKALPAPIEKTISKAKGQPREPQVYTLPPSREEMTKNQVSLTCLVKGFYPSDIAVEWESNGQPENNYKTTPPVLDSDGSFFLYSKLTVDKSRWQQGNVFSCSVMHEALHNHYTQKSLSLSPG

SEQ ID NO: 60 - protein, 133 aa, Artificial Sequence
  Description of Artificial Sequence: Synthetic polypeptide
  MOD_RES (53)..(53): L or I
  MOD_RES (56)..(56): L or I
  MOD_RES (80)..(80): L or I
  MOD_RES (118)..(118): L or I
  See specification as filed for detailed description of substitutions and preferred embodiments
APTSSSTKKTQLQLEHLLLDLQMILNGINNYKNPKLTRMLTFKFYMPKKATEXKHXQCLEEELKPLEEALNLAPSKNFHXRPRDLISDINVIVLELKGSETTFMCEYADETATIVEFXNRWITFSQSIISTLT

SEQ ID NO: 61 - protein, 9 aa, Artificial Sequence
  Description of Artificial Sequence: Synthetic peptide
FTFSSYGMH

SEQ ID NO: 62 - protein, 13 aa, Artificial Sequence
  Description of Artificial Sequence: Synthetic peptide
AVISDDGSDKYYA

SEQ ID NO: 63 - protein, 15 aa, Artificial Sequence
  Description of Artificial Sequence: Synthetic peptide
CTTSKYYYYYGMDVW

SEQ ID NO: 64 - protein, 11 aa, Artificial Sequence
  Description of Artificial Sequence: Synthetic peptide
QASQDISKSLN

SEQ ID NO: 65 - protein, 7 aa, Artificial Sequence
  Description of Artificial Sequence: Synthetic peptide
AASSLQS

SEQ ID NO: 66 - protein, 11 aa, Artificial Sequence [sequence omitted]

SEQ ID NO: 67 - protein, 247 aa, Artificial Sequence
  Description of Artificial Sequence: Synthetic polypeptide
EVQLLESGGGLVQPGGSLRLSCAASGFTFSSYGMHWVRQAPGKGLEWVAVISDDGSDKYYADSVKGRFTISRDNSKNTLYLQMNSLRAEDTAVYYCTTSKYYYYYGMDVWGQGTTVTVSSGGGGSGGGGSGGGGSGGGGSDIQMTQSPSSLSASVGDRVTITCQASQDISKSLNWYQQKPGKAPKLLIYAASSLQSGVPSRFSGSGSGTDFTLTISSLQPEDFATYYCQQGYSTPLTFGGGTKVEIK

SEQ ID NO: 68 - protein, 9 aa, Artificial Sequence
  Description of Artificial Sequence: Synthetic peptide
YPFIGYYLH

SEQ ID NO: 69 - protein, 13 aa, Artificial Sequence
  Description of Artificial Sequence: Synthetic peptide
GIINPSGGSTSYA

SEQ ID NO: 70 - protein, 14 aa, Artificial Sequence
  Description of Artificial Sequence: Synthetic peptide
CAREGRLSYGMDAW

SEQ ID NO: 71 - protein, 11 aa, Artificial Sequence
  Description of Artificial Sequence: Synthetic peptide
RASQSISSYLA

SEQ ID NO: 72 - protein, 7 aa, Artificial Sequence
  Description of Artificial Sequence: Synthetic peptide
GASTLES

SEQ ID NO: 73 - protein, 11 aa, Artificial Sequence
  Description of Artificial Sequence: Synthetic peptide
CQQTWGPPFTF

SEQ ID NO: 74 - protein, 246 aa, Artificial Sequence
  Description of Artificial Sequence: Synthetic polypeptide
QVQLVQSGAEVKKPGASVKVSCKASGYPFIGYYLHWVRQAPGQGLEWMGIINPSGGSTSYAQKFQGRVTMTRDTSTSTVYMELSSLRSEDTAVYYCAREGRLSYGMDAWGQGTLVTVSSGGGGSGGGGSGGGGSGGGGSDIQMTQSPSSLSASVGDRVTITCRASQSISSYLAWYQQKPGKAPKLLIYGASTLESGVPSRFSGSGSGTDFTLTISSLQPEDFATYYCQQTWGPPFTFGQGTKLEIK

SEQ ID NO: 75 - protein, 9 aa, Artificial Sequence
  Description of Artificial Sequence: Synthetic peptide
YPFIGQYLH

SEQ ID NO: 76 - protein, 246 aa, Artificial Sequence
  Description of Artificial Sequence: Synthetic polypeptide
QVQLVQSGAEVKKPGASVKVSCKASGYPFIGQYLHWVRQAPGQGLEWMGIINPSGGSTSYAQKFQGRVTMTRDTSTSTVYMELSSLRSEDTAVYYCAREGRLSYGMDAWGQGTLVTVSSGGGGSGGGGSGGGGSGGGGSDIQMTQSPSSLSASVGDRVTITCRASQSISSYLAWYQQKPGKAPKLLIYGASTLESGVPSRFSGSGSGTDFTLTISSLQPEDFATYYCQQTWGPPFTFGQGTKLEIK

SEQ ID NO: 77 - protein, 9 aa, Artificial Sequence
  Description of Artificial Sequence: Synthetic peptide
GTFSSYAIS

SEQ ID NO: 78 - protein, 13 aa, Artificial Sequence
  Description of Artificial Sequence: Synthetic peptide
GSINPSGDTTSYA

SEQ ID NO: 79 - protein, 16 aa, Artificial Sequence
  Description of Artificial Sequence: Synthetic peptide
CAKDKAQWLVGYFDYW

SEQ ID NO: 80 - protein, 11 aa, Artificial Sequence
  Description of Artificial Sequence: Synthetic peptide
QASQDISNSLN

SEQ ID NO: 81 - protein, 11 aa, Artificial Sequence
  Description of Artificial Sequence: Synthetic peptide
CQQSYSSVITF

SEQ ID NO: 82 - protein, 248 aa, Artificial Sequence
  Description of Artificial Sequence: Synthetic polypeptide
QVQLVQSGAEVKKPGASVKVSCKASGGTFSSYAISWVRQAPGQGLEWMGSINPSGDTTSYAQKFQGRVTMTRDTSTSTVYMELSSLRSEDTAVYYCAKDKAQWLVGYFDYWGQGTLVTVSSGGGGSGGGGSGGGGSGGGGSDIQMTQSPSSLSASVGDRVTITCQASQDISNSLNWYQQKPGKAPKLLIYAASSLQSGVPSRFSGSGSGTDFTLTISSLQPEDFATYYCQQSYSSVITFGQGTKVEIK

SEQ ID NO: 83 - protein, 9 aa, Artificial Sequence
  Description of Artificial Sequence: Synthetic peptide
FTFSSYWMH

SEQ ID NO: 84 - protein, 13 aa, Artificial Sequence
  Description of Artificial Sequence: Synthetic peptide
SSISPGGSNIDYA

SEQ ID NO: 85 - protein, 13 aa, Artificial Sequence
  Description of Artificial Sequence: Synthetic peptide
CAREVQLSHYDYW

SEQ ID NO: 86 - protein, 11 aa, Artificial Sequence
  Description of Artificial Sequence: Synthetic peptide
RASQGISNSLA

SEQ ID NO: 87 - protein, 7 aa, Artificial Sequence
  Description of Artificial Sequence: Synthetic peptide
GASSLQS

SEQ ID NO: 88 - protein, 11 aa, Artificial Sequence [sequence omitted]

SEQ ID NO: 89 - protein, 245 aa, Artificial Sequence
  Description of Artificial Sequence: Synthetic polypeptide
EVQLLESGGGLVQPGGSLRLSCAASGFTFSSYWMHWVRQAPGKGLEWVSSISPGGSNIDYADSVKGRFTISRDNSKNTLYLQMNSLRAEDTAVYYCAREVQLSHYDYWGQGTLVTVSSGGGGSGGGGSGGGGSGGGGSDIQMTQSPSSLSASVGDRVTITCRASQGISNSLAWYQQKPGKAPKLLIYGASSLQSGVPSRFSGSGSGTDFTLTISSLQPEDFATYYCQQANSFPFTFGQGTKVEIK

SEQ ID NO: 90 - protein, 9 aa, Artificial Sequence
  Description of Artificial Sequence: Synthetic peptide
FTFNNYAFH

SEQ ID NO: 91 - protein, 13 aa, Artificial Sequence
  Description of Artificial Sequence: Synthetic peptide
SRINSYGTSTTYA

SEQ ID NO: 92 - protein, 16 aa, Artificial Sequence
  Description of Artificial Sequence: Synthetic peptide
CAREGPVAGYWYFDLW

SEQ ID NO: 93 - protein, 11 aa, Artificial Sequence
  Description of Artificial Sequence: Synthetic peptide
RASQIIGTNLA

SEQ ID NO: 94 - protein, 11 aa, Artificial Sequence [sequence omitted]

SEQ ID NO: 95 - protein, 248 aa, Artificial Sequence
  Description of Artificial Sequence: Synthetic polypeptide
EVQLLESGGGLVQPGGSLRLSCAASGFTFNNYAFHWVRQAPGKGLEWVSRINSYGTSTTYADSVKGRFTISRDNSKNTLYLQMNSLRAEDTAVYYCAREGPVAGYWYFDLWGQGTLVTVSSGGGGSGGGGSGGGGSGGGGSDIQMTQSPSSLSASVGDRVTITCRASQIIGTNLAWYQQKPGKAPKLLIYGASSLQSGVPSRFSGSGSGTDFTLTISSLQPEDFATYYCQQSYRLPFTFGQGTKVEIK

SEQ ID NO: 96 - protein, 9 aa, Artificial Sequence
  Description of Artificial Sequence: Synthetic peptide
YTFTGYHIH

SEQ ID NO: 97 - protein, 13 aa, Artificial Sequence
  Description of Artificial Sequence: Synthetic peptide
GIINPSGGSTIYA

SEQ ID NO: 98 - protein, 16 aa, Artificial Sequence
  Description of Artificial Sequence: Synthetic peptide
CAKDWSSWYLGPFDYW

SEQ ID NO: 99 - protein, 11 aa, Artificial Sequence
  Description of Artificial Sequence: Synthetic peptide
RASQNISSSLN

SEQ ID NO: 100 - protein, 11 aa, Artificial Sequence [sequence omitted]

SEQ ID NO: 101 - protein, 248 aa, Artificial Sequence
  Description of Artificial Sequence: Synthetic polypeptide
QVQLVQSGAEVKKPGASVKVSCKASGYTFTGYHIHWVRQAPGQGLEWMGIINPSGGSTIYAQKFQGRVTMTRDTSTSTVYMELSSLRSEDTAVYYCAKDWSSWYLGPFDYWGQGTLVTVSSGGGGSGGGGSGGGGSGGGGSDIQMTQSPSSLSASVGDRVTITCRASQNISSSLNWYQQKPGKAPKLLIYAASSLQSGVPSRFSGSGSGTDFTLTISSLQPEDFATYYCQQSYTTPYTFGQGTKVEIK

SEQ ID NO: 102 - protein, 9 aa, Artificial Sequence
  Description of Artificial Sequence: Synthetic peptide
FMFGDYAMH

SEQ ID NO: 103 - protein, 13 aa, Artificial Sequence
  Description of Artificial Sequence: Synthetic peptide
SAISGSGGSTYYA

SEQ ID NO: 104 - protein, 16 aa, Artificial Sequence
  Description of Artificial Sequence: Synthetic peptide
CAKDLVVAGIWYFDLW

SEQ ID NO: 105 - protein, 11 aa, Artificial Sequence
  Description of Artificial Sequence: Synthetic peptide
RASQGISNNLN

SEQ ID NO: 106 - protein, 7 aa, Artificial Sequence
  Description of Artificial Sequence: Synthetic peptide
DASSLES

SEQ ID NO: 107 - protein, 11 aa, Artificial Sequence [sequence omitted]

SEQ ID NO: 108 - protein, 248 aa, Artificial Sequence
  Description of Artificial Sequence: Synthetic polypeptide
EVQLLESGGGLVQPGGSLRLSCAASGFMFGDYAMHWVRQAPGKGLEWVSAISGSGGSTYYADSVKGRFTISRDNSKNTLYLQMNSLRAEDTAVYYCAKDLVVAGIWYFDLWGRGTLVTVSSGGGGSGGGGSGGGGSGGGGSDIQMTQSPSSLSASVGDRVTITCRASQGISNNLNWYQQKPGKAPKLLIYDASSLESGVPSRFSGSGSGTDFTLTISSLQPEDFATYYCQQTHSFPSTFGQGTKLEIK

SEQ ID NO: 109 - protein, 9 aa, Artificial Sequence
  Description of Artificial Sequence: Synthetic peptide
FTFSDYYMN

SEQ ID NO: 110 - protein, 13 aa, Artificial Sequence
  Description of Artificial Sequence: Synthetic peptide
SVIGESGGSTYYA

SEQ ID NO: 111 - protein, 18 aa, Artificial Sequence
  Description of Artificial Sequence: Synthetic peptide
CAADPVSRWPKHGGGDYW

SEQ ID NO: 112 - protein, 11 aa, Artificial Sequence
  Description of Artificial Sequence: Synthetic peptide
RASQGISSSLA

SEQ ID NO: 113 - protein, 7 aa, Artificial Sequence
  Description of Artificial Sequence: Synthetic peptide
AASTLQS

SEQ ID NO: 114 - protein, 11 aa, Artificial Sequence [sequence omitted]

SEQ ID NO: 115 - protein, 250 aa, Artificial Sequence
  Description of Artificial Sequence: Synthetic polypeptide
EVQLLESGGGLVQPGGSLRLSCAASGFTFSDYYMNWVRQAPGKGLEWVSVIGESGGSTYYADSVKGRFTISRDNSKNTLYLQMNSLRAEDTAVYYCAADPVSRWPKHGGGDYWGQGTLVTVSSGGGGSGGGGSGGGGSGGGGSDIQMTQSPSSLSASVGDRVTITCRASQGISSSLAWYQQKPGKAPKLLIYAASTLQSGVPSRFSGSGSGTDFTLTISSLQPEDFATYYCQQSYSTPWTFGQGTKVEIK

SEQ ID NO: 116 - protein, 9 aa, Artificial Sequence
  Description of Artificial Sequence: Synthetic peptide
YTLTTWYMY

SEQ ID NO: 117 - protein, 13 aa, Artificial Sequence
  Description of Artificial Sequence: Synthetic peptide
GWINPNRGATNYA

SEQ ID NO: 118 - protein, 13 aa, Artificial Sequence
  Description of Artificial Sequence: Synthetic peptide
CAKGDLWGAMDVW

SEQ ID NO: 119 - protein, 11 aa, Artificial Sequence
  Description of Artificial Sequence: Synthetic peptide
RASDNIGSWLA

SEQ ID NO: 120 - protein, 11 aa, Artificial Sequence [sequence omitted]

SEQ ID NO: 121 - protein, 245 aa, Artificial Sequence
  Description of Artificial Sequence: Synthetic polypeptide
QVQLVQSGAEVKKPGASVKVSCKASGYTLTTWYMYWVRQAPGQGLEWMGWINPNRGATNYAQKFQGRVTMTRDTSTSTVYMELSSLRSEDTAVYYCAKGDLWGAMDVWGQGTLVTVSSGGGGSGGGGSGGGGSGGGGSDIQMTQSPSSLSASVGDRVTITCRASDNIGSWLAWYQQKPGKAPKLLIYAASSLQSGVPSRFSGSGSGTDFTLTISSLQPEDFATYYCQQGYSTPPTFGQGTKVEIK

SEQ ID NO: 122 - protein, 9 aa, Artificial Sequence
  Description of Artificial Sequence: Synthetic peptide
YTFTTYYMH

SEQ ID NO: 123 - protein, 13 aa, Artificial Sequence
  Description of Artificial Sequence: Synthetic peptide
GGFDPEDGETIYA

SEQ ID NO: 124 - protein, 22 aa, Artificial Sequence
  Description of Artificial Sequence: Synthetic peptide
CARHAVAGAVGAGYYYYGMDVW

SEQ ID NO: 125 - protein, 11 aa, Artificial Sequence
  Description of Artificial Sequence: Synthetic peptide
RASESISNWLA

SEQ ID NO: 126 - protein, 11 aa, Artificial Sequence [sequence omitted]

SEQ ID NO: 127 - protein, 254 aa, Artificial Sequence
  Description of Artificial Sequence: Synthetic polypeptide
QVQLVQSGAEVKKPGASVKVSCKASGYTFTTYYMHWVRQAPGQGLEWMGGFDPEDGETIYAQKFQGRVTMTRDTSTSTVYMELSSLRSEDTAVYYCARHAVAGAVGAGYYYYGMDVWGQGTMVTVSSGGGGSGGGGSGGGGSGGGGSDIQMTQSPSSLSASVGDRVTITCRASESISNWLAWYQQKPGKAPKLLIYAASTLQSGVPSRFSGSGSGTDFTLTISSLQPEDFATYYCQQSYSVPFTFGPGTKVDIK

SEQ ID NO: 128 - protein, 9 aa, Artificial Sequence
  Description of Artificial Sequence: Synthetic peptide
YTFTGYYMH

SEQ ID NO: 129 - protein, 13 aa, Artificial Sequence
  Description of Artificial Sequence: Synthetic peptide
GWIGPNSGDTNYA

SEQ ID NO: 130 - protein, 14 aa, Artificial Sequence
  Description of Artificial Sequence: Synthetic peptide
CARDLDHNWYFDLW

SEQ ID NO: 131 - protein, 16 aa, Artificial Sequence
  Description of Artificial Sequence: Synthetic peptide
RSSQSLLHSNGYNYLD

SEQ ID NO: 132 - protein, 7 aa, Artificial Sequence
  Description of Artificial Sequence: Synthetic peptide
SSSNRAP

SEQ ID NO: 133 - protein, 11 aa, Artificial Sequence [sequence omitted]

SEQ ID NO: 134 - protein, 251 aa, Artificial Sequence
  Description of Artificial Sequence: Synthetic polypeptide
QVQLVQSGAEVKKPGASVKVSCKASGYTFTGYYMHWVRQAPGQGLEWMGWIGPNSGDTNYAQKFQGRVTMTRDTSTSTVYMELSSLRSEDTAVYYCARDLDHNWYFDLWGRGTLVTVSSGGGGSGGGGSGGGGSGGGGSDIVMTQSPLSLPVTPGEPASISCRSSQSLLHSNGYNYLDWYLQKPGQSPQLLIYSSSNRAPGVPDRFSGSGSGTDFTLKISRVEAEDVGVYYCMQALHIPLTFGGGTKVEIK

SEQ ID NO: 135 - protein, 9 aa, Artificial Sequence
  Description of Artificial Sequence: Synthetic peptide
FTFDDYAMH

SEQ ID NO: 136 - protein, 13 aa, Artificial Sequence
  Description of Artificial Sequence: Synthetic peptide
SYIDASGTTIYYA

SEQ ID NO: 137 - protein, 16 aa, Artificial Sequence
  Description of Artificial Sequence: Synthetic peptide
CAKDQAAAGYWYFDLW

SEQ ID NO: 138 - protein, 11 aa, Artificial Sequence
  Description of Artificial Sequence: Synthetic peptide
QASQDISNYLN

SEQ ID NO: 139 - protein, 7 aa, Artificial Sequence
  Description of Artificial Sequence: Synthetic peptide
KASTLES

SEQ ID NO: 140 - protein, 11 aa, Artificial Sequence [sequence omitted]

SEQ ID NO: 141 - protein, 248 aa, Artificial Sequence
  Description of Artificial Sequence: Synthetic polypeptide
EVQLLESGGGLVQPGGSLRLSCAASGFTFDDYAMHWVRQAPGKGLEWVSYIDASGTTIYYADSVKGRFTISRDNSKNTLYLQMNSLRAEDTAVYYCAKDQAAAGYWYFDLWGRGTLVTVSSGGGGSGGGGSGGGGSGGGGSDIQMTQSPSSLSASVGDRVTITCQASQDISNYLNWYQQKPGKAPKLLIYKASTLESGVPSRFSGSGSGTDFTLTISSLQPEDFATYYCQQSYSTPITFGQGTRLEIK

SEQ ID NO: 142 - protein, 9 aa, Artificial Sequence
  Description of Artificial Sequence: Synthetic peptide
YTFTDYHIH

SEQ ID NO: 143 - protein, 13 aa, Artificial Sequence
  Description of Artificial Sequence: Synthetic peptide
GGIVPRSGSTTYA

SEQ ID NO: 144 - protein, 15 aa, Artificial Sequence
  Description of Artificial Sequence: Synthetic peptide
CAKDESSGWYYFDYW

SEQ ID NO: 145 - protein, 7 aa, Artificial Sequence
  Description of Artificial Sequence: Synthetic peptide
SAYNRAS

SEQ ID NO: 146 - protein, 11 aa, Artificial Sequence [sequence omitted]

SEQ ID NO: 147 - protein, 252 aa, Artificial Sequence
  Description of Artificial Sequence: Synthetic polypeptide
QVQLVQSGAEVKKPGSSVKVSCKASGYTFTDYHIHWVRQAPGQGLEWMGGIVPRSGSTTYAQKFQGRVTITADESTSTAYMELSSLRSEDTAVYYCAKDESSGWYYFDYWGQGTLVTVSSGGGGSGGGGSGGGGSGGGGSDIVMTQSPLSLPVTPGEPASISCRSSQSLLHSNGYNYLDWYLQKPGQSPQLLIYSAYNRASGVPDRFSGSGSGTDFTLKISRVEAEDVGVYYCMQALQTPLTFGQGTKVEIK

SEQ ID NO: 148 - protein, 9 aa, Artificial Sequence
  Description of Artificial Sequence: Synthetic peptide
YTFTNYYMH

SEQ ID NO: 149 - protein, 13 aa, Artificial Sequence
  Description of Artificial Sequence: Synthetic peptide
GGIIPIVDRVKYA

SEQ ID NO: 150 - protein, 17 aa, Artificial Sequence
  Description of Artificial Sequence: Synthetic peptide
CAKGRYTVNYYYGMDVW

SEQ ID NO: 151 - protein, 11 aa, Artificial Sequence
  Description of Artificial Sequence: Synthetic peptide
QANQDISNYLN

SEQ ID NO: 152 - protein, 7 aa, Artificial Sequence
  Description of Artificial Sequence: Synthetic peptide
RASKLEA

SEQ ID NO: 153 - protein, 11 aa, Artificial Sequence
  Description of Artificial Sequence: Synthetic peptide
CQQSSEIPYSF

SEQ ID NO: 154 - protein, 249 aa, Artificial Sequence
  Description of Artificial Sequence: Synthetic polypeptide
QVQLVQSGAEVKKPGSSVKVSCKASGYTFTNYYMHWVRQAPGQGLEWMGGIIPIVDRVKYAQKFQGRVTITADESTSTAYMELSSLRSEDTAVYYCAKGRYTVNYYYGMDVWGQGTTVTVSSGGGGSGGGGSGGGGSGGGGSDIQMTQSPSSLSASVGDRVTITCQANQDISNYLNWYQQKPGKAPKLLIYRASKLEAGVPSRFSGSGSGTDFTLTISSLQPEDFATYYCQQSSEIPYSFGQGTKLEIK

SEQ ID NO: 155 - protein, 9 aa, Artificial Sequence
  Description of Artificial Sequence: Synthetic peptide
FTFEDYAMH

SEQ ID NO: 156 - protein, 13 aa, Artificial Sequence
  Description of Artificial Sequence: Synthetic peptide
SYLNSDGGSTSYA

SEQ ID NO: 157 - protein, 16 aa, Artificial Sequence
  Description of Artificial Sequence: Synthetic peptide
CAKDYCTNGVCAFDYW

SEQ ID NO: 158 - protein, 11 aa, Artificial Sequence
  Description of Artificial Sequence: Synthetic peptide
RASQSISTYLN

SEQ ID NO: 159 - protein, 7 aa, Artificial Sequence
  Description of Artificial Sequence: Synthetic peptide
DASNLET

SEQ ID NO: 160 - protein, 11 aa, Artificial Sequence [sequence omitted]

SEQ ID NO: 161 - protein, 248 aa, Artificial Sequence
  Description of Artificial Sequence: Synthetic polypeptide
EVQLLESGGGLVQPGGSLRLSCAASGFTFEDYAMHWVRQAPGKGLEWVSYLNSDGGSTSYADSVKGRFTISRDNSKNTLYLQMNSLRAEDTAVYYCAKDYCTNGVCAFDYWGQGTLVTVSSGGGGSGGGGSGGGGSGGGGSDIQMTQSPSSLSASVGDRVTITCRASQSISTYLNWYQQKPGKAPKLLIYDASNLETGVPSRFSGSGSGTDFTLTISSLQPEDFATYYCQQSYTIPITFGQGTRLEIK

SEQ ID NO: 162 - protein, 9 aa, Artificial Sequence
  Description of Artificial Sequence: Synthetic peptide
FTFSDSAMH

SEQ ID NO: 163 - protein, 13 aa, Artificial Sequence
  Description of Artificial Sequence: Synthetic peptide
SAISGSGSTIYYA

SEQ ID NO: 164 - protein, 16 aa, Artificial Sequence
  Description of Artificial Sequence: Synthetic peptide
CVSDIAVAGHWYFDLW

SEQ ID NO: 165 - protein, 11 aa, Artificial Sequence
  Description of Artificial Sequence: Synthetic peptide
RASQSISTFLN

SEQ ID NO: 166 - protein, 7 aa, Artificial Sequence
  Description of Artificial Sequence: Synthetic peptide
AASRLEG

SEQ ID NO: 167 - protein, 11 aa, Artificial Sequence [sequence omitted]

SEQ ID NO: 168 - protein, 248 aa, Artificial Sequence
  Description of Artificial Sequence: Synthetic polypeptide
EVQLLESGGGLVQPGGSLRLSCAASGFTFSDSAMHWVRQAPGKGLEWVSAISGSGSTIYYADSVKGRFTISRDNSKNTLYLQMNSLRAEDTAVYYCVSDIAVAGHWYFDLWGRGTLVTVSSGGGGSGGGGSGGGGSGGGGSDIQMTQSPSSLSASVGDRVTITCRASQSISTFLNWYQQKPGKAPKLLIYAASRLEGGVPSRFSGSGSGTDFTLTISSLQPEDFATYYCQQANSFPLTFGPGTKVDIK

SEQ ID NO: 169 - protein, 9 aa, Artificial Sequence
  Description of Artificial Sequence: Synthetic peptide
FTFSSYWMS

SEQ ID NO: 170 - protein, 13 aa, Artificial Sequence
  Description of Artificial Sequence: Synthetic peptide
SYISGDSGYTNYA

SEQ ID NO: 171 - protein, 17 aa, Artificial Sequence
  Description of Artificial Sequence: Synthetic peptide
CARANSSGWYDWYFDLW

SEQ ID NO: 172 - protein, 11 aa, Artificial Sequence
  Description of Artificial Sequence: Synthetic peptide
RASQSISSYLN

SEQ ID NO: 173 - protein, 11 aa, Artificial Sequence [sequence omitted]

SEQ ID NO: 174 - protein, 249 aa, Artificial Sequence
  Description of Artificial Sequence: Synthetic polypeptide
EVQLVESGGGLVKPGGSLRLSCAASGFTFSSYWMSWVRQAPGKGLEWVSYISGDSGYTNYAAPVKGRFTISRDDSKNTLYLQMNSLKTEDTAVYYCARANSSGWYDWYFDLWGRGTLVTVSSGGGGSGGGGSGGGGSGGGGSDIQMTQSPSSLSASVGDRVTITCRASQSISSYLNWYQQKPGKAPKLLIYAASSLQSGVPSRFSGSGSGTDFTLTISSLQPEDFATYYCQQSYSTPLTFGGGTKVEIK

SEQ ID NO: 175 - protein, 13 aa, Artificial Sequence
  Description of Artificial Sequence: Synthetic peptide
SGISWNSGSIGYA

SEQ ID NO: 176 - protein, 18 aa, Artificial Sequence
  Description of Artificial Sequence: Synthetic peptide
CAKDIVAAGHYYYGMDVW

SEQ ID NO: 177 - protein, 250 aa, Artificial Sequence
  Description of Artificial Sequence: Synthetic polypeptide
EVQLLESGGGLVQPGGSLRLSCAASGFTFDDYAMHWVRQAPGKGLEWVSGISWNSGSIGYADSVKGRFTISRDNSKNTLYLQMNSLRAEDTAVYYCAKDIVAAGHYYYGMDVWGQGTTVTVSSGGGGSGGGGSGGGGSGGGGSDIQMTQSPSSLSASVGDRVTITCQASQDISNYLNWYQQKPGKAPKLLIYDASNLETGVPSRFSGSGSGTDFTLTISSLQPEDFATYYCQQSYSTPLTFGGGTKVEIK

SEQ ID NO: 178 - protein, 13 aa, Artificial Sequence
  Description of Artificial Sequence: Synthetic peptide
SYIDTSSSHLYYA

SEQ ID NO: 179 - protein, 16 aa, Artificial Sequence
  Description of Artificial Sequence: Synthetic peptide
CARDEAAAGYYGMDVW

SEQ ID NO: 180 - protein, 11 aa, Artificial Sequence
  Description of Artificial Sequence: Synthetic peptide
QAGQDISNYLN

SEQ ID NO: 181 - protein, 11 aa, Artificial Sequence [sequence omitted]

SEQ ID NO: 182 - protein, 248 aa, Artificial Sequence
  Description of Artificial Sequence: Synthetic polypeptide
EVQLLESGGGLVQPGGSLRLSCAASGFTFDDYAMHWVRQAPGKGLEWVSYIDTSSSHLYYADSVKGRFTISRDNSKNTLYLQMNSLRAEDTAVYYCARDEAAAGYYGMDVWGQGTTVTVSSGGGGSGGGGSGGGGSGGGGSDIQMTQSPSSLSASVGDRVTITCQAGQDISNYLNWYQQKPGKAPKLLIYDASNLETGVPSRFSGSGSGTDFTLTISSLQPEDFATYYCQQTYSTPITFGQGTKLEIK

SEQ ID NO: 183 - protein, 9 aa, Artificial Sequence
  Description of Artificial Sequence: Synthetic peptide
FTFSNAWMS

SEQ ID NO: 184 - protein, 13 aa, Artificial Sequence
  Description of Artificial Sequence: Synthetic peptide
STIVGNGGATYYA

SEQ ID NO: 185 - protein, 15 aa, Artificial Sequence
  Description of Artificial Sequence: Synthetic peptide
CARDNPLRWQGMDVW

SEQ ID NO: 186 - protein, 11 aa, Artificial Sequence
  Description of Artificial Sequence: Synthetic peptide
RASQDISNYLN

SEQ ID NO: 187 - protein, 11 aa, Artificial Sequence [sequence omitted]

SEQ ID NO: 188 - protein, 247 aa, Artificial Sequence
  Description of Artificial Sequence: Synthetic polypeptide
EVQLLESGGGLVQPGGSLRLSCAASGFTFSNAWMSWVRQAPGKGLEWVSTIVGNGGATYYADSVKGRFTISRDNSKNTLYLQMNSLRAEDTAVYYCARDNPLRWQGMDVWGQGTLVTVSSGGGGSGGGGSGGGGSGGGGSDIQMTQSPSSLSASVGDRVTITCRASQDISNYLNWYQQKPGKAPKLLIYAASSLQSGVPSRFSGSGSGTDFTLTISSLQPEDFATYYCQQSYSIPPTFGPGTKVDIK

SEQ ID NO: 189 - protein, 9 aa, Artificial Sequence
  Description of Artificial Sequence: Synthetic peptide
FTFSSYQMS

SEQ ID NO: 190 - protein, 13 aa, Artificial Sequence
  Description of Artificial Sequence: Synthetic peptide
SYISSSSTYTNYA

SEQ ID NO: 191 - protein, 17 aa, Artificial Sequence
  Description of Artificial Sequence: Synthetic peptide
CARANSSSWYDWYFDLW

SEQ ID NO: 192 - protein, 249 aa, Artificial Sequence
  Description of Artificial Sequence: Synthetic polypeptide
EVQLLESGGGLVQPGGSLRLSCAASGFTFSSYQMSWVRQAPGKGLEWVSYISSSSTYTNYADSVKGRFTISRDNSKNTLYLQMNSLRAEDTAVYYCARANSSSWYDWYFDLWGQGTLVTVSSGGGGSGGGGSGGGGSGGGGSDIQMTQSPSSLSASVGDRVTITCRASQSISSYLNWYQQKPGKAPKLLIYAASSLQSGVPSRFSGSGSGTDFTLTISSLQPEDFATYYCQQSYSTPLTFGGGTKVEIK

SEQ ID NO: 193 - protein, 9 aa, Artificial Sequence
  Description of Artificial Sequence: Synthetic peptide
FTFSSYAMH

SEQ ID NO: 194 - protein, 13 aa, Artificial Sequence
  Description of Artificial Sequence: Synthetic peptide
SGISGSGGSAYYA

SEQ ID NO: 195 - protein, 18 aa, Artificial Sequence
  Description of Artificial Sequence: Synthetic peptide
CATSQAPVDYYYYGMDVW

SEQ ID NO: 196 - protein, 11 aa, Artificial Sequence
  Description of Artificial Sequence: Synthetic peptide
RASQSISSWLA

SEQ ID NO: 197 - protein, 7 aa, Artificial Sequence
  Description of Artificial Sequence: Synthetic peptide
AASNLQR

SEQ ID NO: 198 - protein, 11 aa, Artificial Sequence [sequence omitted]

SEQ ID NO: 199 - protein, 250 aa, Artificial Sequence
  Description of Artificial Sequence: Synthetic polypeptide
EVQLLESGGGLVQPGGSLRLSCAASGFTFSSYAMHWVRQAPGKGLEWVSGISGSGGSAYYADSVKGRFTISRDNSKNTLYLQMNSLRAEDTAVYYCATSQAPVDYYYYGMDVWGQGTTVTVSSGGGGSGGGGSGGGGSGGGGSDIQMTQSPSSLSASVGDRVTITCRASQSISSWLAWYQQKPGKAPKLLIYAASNLQRGVPSRFSGSGSGTDFTLTISSLQPEDFATYYCQQSYSIPITFGQGTKVEIK

SEQ ID NO: 200 - protein, 13 aa, Artificial Sequence
  Description of Artificial Sequence: Synthetic peptide
SYISGSSSYTNYA

SEQ ID NO: 201 - protein, 17 aa, Artificial Sequence
  Description of Artificial Sequence: Synthetic peptide
CARVGSSGWYDWYFDLW

SEQ ID NO: 202 - protein, 249 aa, Artificial Sequence
  Description of Artificial Sequence: Synthetic polypeptide
EVQLVESGGGLVKPGGSLRLSCAASGFTFSSYWMSWVRQAPGKGLEWVSYISGSSSYTNYAAPVKGRFTISRDDSKNTLYLQMNSLKTEDTAVYYCARVGSSGWYDWYFDLWGRGTLVTVSSGGGGSGGGGSGGGGSGGGGSDIQMTQSPSSLSASVGDRVTITCRASQSISSYLNWYQQKPGKAPKLLIYAASSLQSGVPSRFSGSGSGTDFTLTISSLQPEDFATYYCQQSYSTPLTFGQGTKVEIK

SEQ ID NO: 203 - protein, 245 aa, Artificial Sequence
  Description of Artificial Sequence: Synthetic polypeptide
QVQLVQSGAEVKKPGASVKVSCKASGYTLTTWYMYWVRQAPGQGLEWMGWINPNRGATNYAQKFQGRVTMTRDTSTSTVYMELSSLRSEDTAVYYCAKGDLWGAMDVWGQGTTVTVSSGGGGSGGGGSGGGGSGGGGSDIQMTQSPSSLSASVGDRVTITCRASDNIGSWLAWYQQKPGKAPKLLIYAASSLQSGVPSRFSGSGSGTDFTLTISSLQPEDFATYYCQQGYSTPPTFGQGTKVEIK

SEQ ID NO: 204 - protein, 9 aa, Artificial Sequence
  Description of Artificial Sequence: Synthetic peptide
YTFTGYYIH

SEQ ID NO: 205 - protein, 13 aa, Artificial Sequence
  Description of Artificial Sequence: Synthetic peptide
GWMNPNSGNTGYA

SEQ ID NO: 206 - protein, 24 aa, Artificial Sequence
  Description of Artificial Sequence: Synthetic peptide
CARDPGFLGYCSGGSCYDGWFDPW

SEQ ID NO: 207 - protein, 11 aa, Artificial Sequence
  Description of Artificial Sequence: Synthetic peptide
RASQSISSYLH

SEQ ID NO: 208 - protein, 11 aa, Artificial Sequence [sequence omitted]

SEQ ID NO: 209 - protein, 256 aa, Artificial Sequence
  Description of Artificial Sequence: Synthetic polypeptide
QVQLVQSGAEVKKPGASVKVSCKASGYTFTGYYIHWVRQAPGQGLEWMGWMNPNSGNTGYAQKFQGRVTMTRDTSTSTVYMELSSLRSEDTAVYYCARDPGFLGYCSGGSCYDGWFDPWGQGTLVTVSSGGGGSGGGGSGGGGSGGGGSDIQMTQSPSSLSASVGDRVTITCRASQSISSYLHWYQQKPGKAPKLLIYAASSLQSGVPSRFSGSGSGTDFTLTISSLQPEDFATYYCQQSYTAPYTFGQGTKLEIK

SEQ ID NO: 210 - protein, 9 aa, Artificial Sequence
  Description of Artificial Sequence: Synthetic peptide
YTFTDYFLH

SEQ ID NO: 211 - protein, 13 aa, Artificial Sequence
  Description of Artificial Sequence: Synthetic peptide
GWMNPTSGNTGYA

SEQ ID NO: 212 - protein, 13 aa, Artificial Sequence
  Description of Artificial Sequence: Synthetic peptide
CAREGEGSGFDYW

SEQ ID NO: 213 - protein, 11 aa, Artificial Sequence
  Description of Artificial Sequence: Synthetic peptide
RASQGINSWLA

SEQ ID NO: 214 - protein, 245 aa, Artificial Sequence
  Description of Artificial Sequence: Synthetic polypeptide
QVQLVQSGAEVKKPGASVKVSCKASGYTFTDYFLHWVRQAPGQGLEWMGWMNPTSGNTGYAQKFQGRVTMTRDTSTSTVYMELSSLRSEDTAVYYCAREGEGSGFDYWGQGTLVTVSSGGGGSGGGGSGGGGSGGGGSDIQMTQSPSSLSASVGDRVTITCRASQGINSWLAWYQQKPGKAPKLLIYDASNLETGVPSRFSGSGSGTDFTLTISSLQPEDFATYYCQQSYSTPLTFGGGTKVEIK

SEQ ID NO: 215 - protein, 9 aa, Artificial Sequence
  Description of Artificial Sequence: Synthetic peptide
YTFTSYYMH

SEQ ID NO: 216 - protein, 13 aa, Artificial Sequence
  Description of Artificial Sequence: Synthetic peptide
AWMNPNSGNTGYA

SEQ ID NO: 217 - protein, 15 aa, Artificial Sequence
  Description of Artificial Sequence: Synthetic peptide
CARDYDFWSGSLGYW

SEQ ID NO: 218 - protein, 11 aa, Artificial Sequence
  Description of Artificial Sequence: Synthetic peptide
RASQGISNYLA

SEQ ID NO: 219 - protein, 247 aa, Artificial Sequence
  Description of Artificial Sequence: Synthetic polypeptide
QVQLVQSGAEVKKPGASVKVSCKASGYTFTSYYMHWVRQAPGQGLEWMAWMNPNSGNTGYAQKFQGRVTMTRDTSTSTVYMELSSLRSEDTAVYYCARDYDFWSGSLGYWGQGTLVTVSSGGGGSGGGGSGGGGSGGGGSDIQMTQSPSSLSASVGDRVTITCRASQGISNYLAWYQQKPGKAPKLLIYAASSLQSGVPSRFSGSGSGTDFTLTISSLQPEDFATYYCQQSYSTPWTFGQGTKVEIK

SEQ ID NO: 220 - protein, 20 aa, Artificial Sequence
  Description of Artificial Sequence: Synthetic peptide
CARDTGYSYGRYYYYGMDVW

SEQ ID NO: 221 - protein, 11 aa, Artificial Sequence
  Description of Artificial Sequence: Synthetic peptide
RASQSIGRWLA

SEQ ID NO: 222 - protein, 7 aa, Artificial Sequence
  Description of Artificial Sequence: Synthetic peptide
DASNLQS

SEQ ID NO: 223 - protein, 252 aa, Artificial Sequence
  Description of Artificial Sequence: Synthetic polypeptide
QVQLVQSGAEVKKPGASVKVSCKASGYTFTSYYMHWVRQAPGQGLEWMGIINPSGGSTSYAQKFQGRVTMTRDTSTSTVYMELSSLRSEDTAVYYCARDTGYSYGRYYYYGMDVWGQGTLVTVSSGGGGSGGGGSGGGGSGGGGSDIQMTQSPSSLSASVGDRVTITCRASQSIGRWLAWYQQKPGKAPKLLIYDASNLQSGVPSRFSGSGSGTDFTLTISSLQPEDFATYYCQQSYSIPITFGQGTKVEIK

SEQ ID NO: 224 - protein, 9 aa, Artificial Sequence
  Description of Artificial Sequence: Synthetic peptide
YTLTDYYMH

SEQ ID NO: 225 - protein, 16 aa, Artificial Sequence
  Description of Artificial Sequence: Synthetic peptide
CAREEYSSSSGYFDYW

SEQ ID NO: 226 - protein, 11 aa, Artificial Sequence
  Description of Artificial Sequence: Synthetic peptide
RASQGISSWLA

SEQ ID NO: 227 - protein, 248 aa, Artificial Sequence
  Description of Artificial Sequence: Synthetic polypeptide
QVQLVQSGAEVKKPGASVKVSCKASGYTLTDYYMHWVRQAPGQGLEWMGIINPSGGSTSYAQKFQGRVTMTRDTSTSTVYMELSSLRSEDTAVYYCAREEYSSSSGYFDYWGQGTLVTVSSGGGGSGGGGSGGGGSGGGGSDIQMTQSPSSLSASVGDRVTITCRASQGISSWLAWYQQKPGKAPKLLIYAASSLQSGVPSRFSGSGSGTDFTLTISSLQPEDFATYYCQQSYSTPLTFGQGTKVEIK

SEQ ID NO: 228 - protein, 9 aa, Artificial Sequence
  Description of Artificial Sequence: Synthetic peptide
YTFTSYGIS

SEQ ID NO: 229 - protein, 13 aa, Artificial Sequence
  Description of Artificial Sequence: Synthetic peptide
GWMHPKSGDTGLT

SEQ ID NO: 230 - protein, 15 aa, Artificial Sequence [sequence omitted]

SEQ ID NO: 231 - protein, 11 aa, Artificial Sequence [sequence omitted]

SEQ ID NO: 232 - protein, 247 aa, Artificial Sequence
  Description of Artificial Sequence: Synthetic polypeptide
QVQLVQSGAEVKKPGASVKVSCKASGYTFTSYGISWVRQAPGQGLEWMGWMHPKSGDTGLTQKFQGRVTMTRDTSTSTVYMELSSLRSEDTAVYYCARDTPYYYYGMDVWGQGTTVTVSSGGGGSGGGGSGGGGSGGGGSDIQMTQSPSSLSASVGDRVTITCRASQSISSWLAWYQQKPGKAPKLLIYAASSLQSGVPSRFSGSGSGTDFTLTISSLQPEDFATYYCQQSYSVPITFGQGTKVEIK

SEQ ID NO: 233 - protein, 9 aa, Artificial Sequence
  Description of Artificial Sequence: Synthetic peptide
FTFGDYAMS

SEQ ID NO: 234 - protein, 13 aa, Artificial Sequence
  Description of Artificial Sequence: Synthetic peptide
SYISGDIGYTNYA

SEQ ID NO: 235 - protein, 16 aa, Artificial Sequence
  Description of Artificial Sequence: Synthetic peptide
CARDVAATGNWYFDLW

SEQ ID NO: 236 - protein, 248 aa, Artificial Sequence
  Description of Artificial Sequence: Synthetic polypeptide
EVQLVESGGGLVKPGGSLRLSCAASGFTFGDYAMSWVRQAPGKGLEWVSYISGDIGYTNYAAPVKGRFTISRDDSKNTLYLQMNSLKTEDTAVYYCARDVAATGNWYFDLWGRGTLVTVSSGGGGSGGGGSGGGGSGGGGSDIQMTQSPSSLSASVGDRVTITCRASQSISSYLNWYQQKPGKAPKLLIYAASSLQSGVPSRFSGSGSGTDFTLTISSLQPEDFATYYCQQSYSTPLTFGGGTKVEIK

SEQ ID NO: 237 - protein, 9 aa, Artificial Sequence
  Description of Artificial Sequence: Synthetic peptide
FSFSSYTMN

SEQ ID NO: 238 - protein, 13 aa, Artificial Sequence
  Description of Artificial Sequence: Synthetic peptide
SFITSSSRTIYYA

SEQ ID NO: 239 - protein, 18 aa, Artificial Sequence
  Description of Artificial Sequence: Synthetic peptide
CARDRRGDYGDSWYFDLW

SEQ ID NO: 240 - protein, 11 aa, Artificial Sequence
  Description of Artificial Sequence: Synthetic peptide
RASQSVRNYLA

SEQ ID NO: 241 - protein, 7 aa, Artificial Sequence
  Description of Artificial Sequence: Synthetic peptide
GASTRAT

SEQ ID NO: 242 - protein, 11 aa, Artificial Sequence [sequence omitted]

SEQ ID NO: 243 - protein, 250 aa, Artificial Sequence
  Description of Artificial Sequence: Synthetic polypeptide
EVQLLESGGGLVQPGGSLRLSCAASGFSFSSYTMNWVRQAPGKGLEWVSFITSSSRTIYYADSVKGRFTISRDNSKNTLYLQMNSLRAEDTAVYYCARDRRGDYGDSWYFDLWGRGTLVTVSSGGGGSGGGGSGGGGSGGGGSEIVMTQSPATLSVSPGERATLSCRASQSVRNYLAWYQQKPGQAPRLLIYGASTRATGIPARFSGSGSGTEFTLTISSLQSEDFAVYYCQQYGSSPLTFGGGTKVEIK

SEQ ID NO: 244 - protein, 9 aa, Artificial Sequence
  Description of Artificial Sequence: Synthetic peptide
YTFTGHYMH

SEQ ID NO: 245 - protein, 252 aa, Artificial Sequence
  Description of Artificial Sequence: Synthetic polypeptide
QVQLVQSGAEVKKPGASVKVSCKASGYTFTGHYMHWVRQAPGQGLEWMGIINPSGGSTSYAQKFQGRVTMTRDTSTSTVYMELSSLRSEDTAVYYCARDTGYSYGRYYYYGMDVWGQGTTVTVSSGGGGSGGGGSGGGGSGGGGSDIQMTQSPSSLSASVGDRVTITCRASQSIGRWLAWYQQKPGKAPKLLIYDASNLQSGVPSRFSGSGSGTDFTLTISSLQPEDFATYYCQQSYSIPITFGGGTKVEIK

SEQ ID NO: 246 - protein, 9 aa, Artificial Sequence
  Description of Artificial Sequence: Synthetic peptide
YTFSKHFVH

SEQ ID NO: 247 - protein, 13 aa, Artificial Sequence
  Description of Artificial Sequence: Synthetic peptide
GWMNPNSGNSGYA

SEQ ID NO: 248 - protein, 16 aa, Artificial Sequence
  Description of Artificial Sequence: Synthetic peptide
CARGEGGYYYYGMDVW

SEQ ID NO: 249 - protein, 248 aa, Artificial Sequence
  Description of Artificial Sequence: Synthetic polypeptide
QVQLVQSGAEVKKPGASVKVSCKASGYTFSKHFVHWVRQAPGQGLEWMGWMNPNSGNSGYAQKFQGRVTMTRDTSTSTVYMELSSLRSEDTAVYYCARGEGGYYYYGMDVWGQGTLVTVSSGGGGSGGGGSGGGGSGGGGSDIQMTQSPSSLSASVGDRVTITCRASQSISSWLAWYQQKPGKAPKLLIYAASTLQSGVPSRFSGSGSGTDFTLTISSLQPEDFATYYCQQSYSTPWTFGQGTKVEIK

SEQ ID NO: 250 - protein, 9 aa, Artificial Sequence
  Description of Artificial Sequence: Synthetic peptide
FTFGSYSMS

SEQ ID NO: 251 - protein, 12 aa, Artificial Sequence
  Description of Artificial Sequence: Synthetic peptide
SAIGTGGGTYYA

SEQ ID NO: 252 - protein, 16 aa, Artificial Sequence
  Description of Artificial Sequence: Synthetic peptide
CAKGTPYYYYYGMDVW

SEQ ID NO: 253 - protein, 11 aa, Artificial Sequence
  Description of Artificial Sequence: Synthetic peptide
RASQPLSNWLA

SEQ ID NO: 254 - protein, 11 aa, Artificial Sequence [sequence omitted]

SEQ ID NO: 255 - protein, 247 aa, Artificial Sequence
  Description of Artificial Sequence: Synthetic polypeptide
EVQLLESGGGLVQPGGSLRLSCAASGFTFGSYSMSWVRQAPGKGLEWVSAIGTGGGTYYADSVKGRFTISRDNSKNTLYLQMNSLRAEDTAVYYCAKGTPYYYYYGMDVWGQGTMVTVSSGGGGSGGGGSGGGGSGGGGSDIQMTQSPSSLSASVGDRVTITCRASQPLSNWLAWYQQKPGKAPKLLIYAASSLQSGVPSRFSGSGSGTDFTLTISSLQPEDFATYYCQQAISFPLTFGGGTKVEIK

SEQ ID NO: 256 - protein, 20 aa, Artificial Sequence
  Description of Artificial Sequence: Synthetic peptide
CARDLGYYDSSGYFGAFDIW

SEQ ID NO: 257 - protein, 11 aa, Artificial Sequence
  Description of Artificial Sequence: Synthetic peptide
QSSEDISSSLN

SEQ ID NO: 258 - protein, 7 aa, Artificial Sequence
  Description of Artificial Sequence: Synthetic peptide
AASSLQI

SEQ ID NO: 259 - protein, 11 aa, Artificial Sequence [sequence omitted]

SEQ ID NO: 260 - protein, 252 aa, Artificial Sequence
  Description of Artificial Sequence: Synthetic polypeptide
QVQLVQSGAEVKKPGASVKVSCKASGYTFTSYYMHWVRQAPGQGLEWMGWMNPNSGNTGYAQKFQGRVTMTRDTSTSTVYMELSSLRSEDTAVYYCARDLGYYDSSGYFGAFDIWGQGTTVTVSSGGGGSGGGGSGGGGSGGGGSDIQMTQSPSSLSASVGDRVTITCQSSEDISSSLNWYQQKPGKAPKLLIYAASSLQIGVPSRFSGSGSGTDFTLTISSLQPEDFATYYCQQTYSTPYTFGQGTKVEIK

SEQ ID NO: 261 - protein, 13 aa, Artificial Sequence
  Description of Artificial Sequence: Synthetic peptide
GIINPRGGSTIFA

SEQ ID NO: 262 - protein, 17 aa, Artificial Sequence
  Description of Artificial Sequence: Synthetic peptide
CARGTRSSGWYGWFDPW

SEQ ID NO: 263 - protein, 11 aa, Artificial Sequence
  Description of Artificial Sequence: Synthetic peptide
RASQGIGNWLA

SEQ ID NO: 264 - protein, 7 aa, Artificial Sequence
  Description of Artificial Sequence: Synthetic peptide
AASNLET

SEQ ID NO: 265 - protein, 11 aa, Artificial Sequence
  Description of Artificial Sequence: Synthetic peptide
CQQIHSYPLTF

SEQ ID NO: 266 - protein, 249 aa, Artificial Sequence
  Description of Artificial Sequence: Synthetic polypeptide
QVQLVQSGAEVKKPGASVKVSCKASGYTFTSYGISWVRQAPGQGLEWMGIINPRGGSTIFAQKFQGRVTMTRDTSTSTVYMELSSLRSEDTAVYYCARGTRSSGWYGWFDPWGQGTLVTVSSGGGGSGGGGSGGGGSGGGGSDIQMTQSPSSLSASVGDRVTITCRASQGIGNWLAWYQQKPGKAPKLLIYAASNLETGVPSRFSGSGSGTDFTLTISSLQPEDFATYYCQQIHSYPLTFGGGTKVEIK

SEQ ID NO: 267 - protein, 9 aa, Artificial Sequence
  Description of Artificial Sequence: Synthetic peptide
FTFDDYGMS

SEQ ID NO: 268 - protein, 13 aa, Artificial Sequence
  Description of Artificial Sequence: Synthetic peptide
SYISSSSSYIYYA

SEQ ID NO: 269 - protein, 16 aa, Artificial Sequence
  Description of Artificial Sequence: Synthetic peptide
CAREIAAAGFYGMDVW

SEQ ID NO: 270 - protein, 248 aa, Artificial Sequence
  Description of Artificial Sequence: Synthetic polypeptide
EVQLLESGGGLVQPGGSLRLSCAASGFTFDDYGMSWVRQAPGKGLEWVSYISSSSSYIYYADSVKGRFTISRDNSKNTLYLQMNSLRAEDTAVYYCAREIAAAGFYGMDVWGQGTTVTVSSGGGGSGGGGSGGGGSGGGGSDIQMTQSPSSLSASVGDRVTITCRASQSISSYLNWYQQKPGKAPKLLIYAASSLQSGVPSRFSGSGSGTDFTLTISSLQPEDFATYYCQQSYSTPLTFGGGTKVEIK

SEQ ID NO: 271 - protein, 9 aa, Artificial Sequence
  Description of Artificial Sequence: Synthetic peptide
GTLSRYGVS

SEQ ID NO: 272 - protein, 13 aa, Artificial Sequence
  Description of Artificial Sequence: Synthetic peptide
GGIIPIFGTTNYA

SEQ ID NO: 273 - protein, 21 aa, Artificial Sequence
  Description of Artificial Sequence: Synthetic peptide
CARDRVYYDSSGYPTWYFDLW

SEQ ID NO: 274 - protein, 12 aa, Artificial Sequence
  Description of Artificial Sequence: Synthetic peptide
RASQSVSSSYLA

SEQ ID NO: 275 - protein, 11 aa, Artificial Sequence [sequence omitted]

SEQ ID NO: 276 - protein, 254 aa, Artificial Sequence
  Description of Artificial Sequence: Synthetic polypeptide
QVQLVQSGAEVKKPGSSVKVSCKASGGTLSRYGVSWVRQAPGQGLEWMGGIIPIFGTTNYAQKFQGRVTITADESTSTAYMELSSLRSEDTAVYYCARDRVYYDSSGYPTWYFDLWGRGTLVTVSSGGGGSGGGGSGGGGSGGGGSEIVMTQSPATLSVSPGERATLSCRASQSVSSSYLAWYQQKPGQAPRLLIYGASTRATGIPARFSGSGSGTEFTLTISSLQSEDFAVYYCQQYGSSPITFGQGTKVEIK

SEQ ID NO: 277 - protein, 9 aa, Artificial Sequence
  Description of Artificial Sequence: Synthetic peptide
FTFDDFAMH

SEQ ID NO: 278 - protein, 13 aa, Artificial Sequence
  Description of Artificial Sequence: Synthetic peptide
SGISGNGDSRYYA

SEQ ID NO: 279 - protein, 16 aa, Artificial Sequence
  Description of Artificial Sequence: Synthetic peptide
CARDASYGGNYGMDVW

SEQ ID NO: 280 - protein, 11 aa, Artificial Sequence
  Description of Artificial Sequence: Synthetic peptide
QASQDIRNYLN

SEQ ID NO: 281 - protein, 248 aa, Artificial Sequence
  Description of Artificial Sequence: Synthetic polypeptide
EVQLLESGGGLVQPGGSLRLSCAASGFTFDDFAMHWVRQAPGKGLEWVSGISGNGDSRYYADSVKGRFTISRDNSKNTLYLQMNSLRAEDTAVYYCARDASYGGNYGMDVWGQGTTVTVSSGGGGSGGGGSGGGGSGGGGSDIQMTQSPSSLSASVGDRVTITCQASQDIRNYLNWYQQKPGKAPKLLIYKASTLESGVPSRFSGSGSGTDFTLTISSLQPEDFATYYCQQANSFPLTFGPGTKVDIK

SEQ ID NO: 282 - protein, 15 aa, Artificial Sequence
  Description of Artificial Sequence: Synthetic peptide
CAREWLVPYYGMDVW

SEQ ID NO: 283 - protein, 11 aa, Artificial Sequence
  Description of Artificial Sequence: Synthetic peptide
RASQSISRWLA

SEQ ID NO: 284 - protein, 7 aa, Artificial Sequence
  Description of Artificial Sequence: Synthetic peptide
GASNLQS

SEQ ID NO: 285 - protein, 246 aa, Artificial Sequence
  Description of Artificial Sequence: Synthetic polypeptide
EVQLVESGGGLVKPGGSLRLSCAASGFTFSSYWMSWVRQAPGKGLEWVSAIGTGGGTYYAAPVKGRFTISRDDSKNTLYLQMNSLKTEDTAVYYCAREWLVPYYGMDVWGQGTTVTVSSGGGGSGGGGSGGGGSGGGGSDIQMTQSPSSLSASVGDRVTITCRASQSISRWLAWYQQKPGKAPKLLIYGASNLQSGVPSRFSGSGSGTDFTLTISSLQPEDFATYYCQQSYSTPWTFGQGTKVEIK

SEQ ID NO: 286 - protein, 9 aa, Artificial Sequence
  Description of Artificial Sequence: Synthetic peptide
FSVSSNYMS

SEQ ID NO: 287 - protein, 13 aa, Artificial Sequence
  Description of Artificial Sequence: Synthetic peptide
AGISYDGSSKPYA

SEQ ID NO: 288 - protein, 15 aa, Artificial Sequence
  Description of Artificial Sequence: Synthetic peptide
CARSRGIAARPLQHW

SEQ ID NO: 289 - protein, 17 aa, Artificial Sequence
  Description of Artificial Sequence: Synthetic peptide
KSSQSVLYSSNNKNYLA

SEQ ID NO: 290 - protein, 7 aa, Artificial Sequence
  Description of Artificial Sequence: Synthetic peptide
WASTRQS

SEQ ID NO: 291 - protein, 11 aa, Artificial Sequence
  Description of Artificial Sequence: Synthetic peptide
CHQYYGHPPTF

SEQ ID NO: 292 - protein, 253 aa, Artificial Sequence
  Description of Artificial Sequence: Synthetic polypeptide
EVQLLESGGGLVQPGGSLRLSCAASGFSVSSNYMSWVRQAPGKGLEWVAGISYDGSSKPYADSVKGRFTISRDNSKNTLYLQMNSLRAEDTAVYYCARSRGIAARPLQHWGQGTLVTVSSGGGGSGGGGSGGGGSGGGGSDIVMTQSPDSLAVSLGERATINCKSSQSVLYSSNNKNYLAWYQQKPGQPPKLLIYWASTRQSGVPDRFSGSGSGTDFTLTISSLQAEDVAVYYCHQYYGHPPTFGGGTKVEIK

SEQ ID NO: 293 - protein, 7 aa, Artificial Sequence
  Description of Artificial Sequence: Synthetic peptide
QASTRQS

SEQ ID NO: 294 - protein, 253 aa, Artificial Sequence
  Description of Artificial Sequence: Synthetic polypeptide
EVQLLESGGGLVQPGGSLRLSCAASGFSVSSNYMSWVRQAPGKGLEWVAGISYDGSSKPYADSVKGRFTISRDNSKNTLYLQMNSLRAEDTAVYYCARSRGIAARPLQHWGQGTLVTVSSGGGGSGGGGSGGGGSGGGGSDIVMTQSPDSLAVSLGERATINCKSSQSVLYSSNNKNYLAWYQQKPGQPPKLLIYQASTRQSGVPDRFSGSGSGTDFTLTISSLQAEDVAVYYCHQYYGHPPTFGGGTKVEIK

SEQ ID NO: 295 - protein, 9 aa, Artificial Sequence
  Description of Artificial Sequence: Synthetic peptide
FSFSDYGMH

SEQ ID NO: 296 - protein, 16 aa, Artificial Sequence
  Description of Artificial Sequence: Synthetic peptide
CARDGGWQPAAILDYW

SEQ ID NO: 297 - protein, 248 aa, Artificial Sequence
  Description of Artificial Sequence: Synthetic polypeptide
EVQLLESGGGLVQPGGSLRLSCAASGFSFSDYGMHWVRQAPGKGLEWVSAISGSGGSTYYADSVKGRFTISRDNSKNTLYLQMNSLRAEDTAVYYCARDGGWQPAAILDYWGQGTLVTVSSGGGGSGGGGSGGGGSGGGGSDIQMTQSPSSLSASVGDRVTITCRASQGISNNLNWYQQKPGKAPKLLIYDASNLETGVPSRFSGSGSGTDFTLTISSLQPEDFATYYCQQSYSTPLTFGGGTKVEIK

SEQ ID NO: 298 - protein, 9 aa, Artificial Sequence
  Description of Artificial Sequence: Synthetic peptide
FTFSDHGMH

SEQ ID NO: 299 - protein, 12 aa, Artificial Sequence
  Description of Artificial Sequence: Synthetic peptide
SVIYGGESTYYA

SEQ ID NO: 300 - protein, 16 aa, Artificial Sequence
  Description of Artificial Sequence: Synthetic peptide
CARDPAVAGGGIFDYW

SEQ ID NO: 301 - protein, 11 aa, Artificial Sequence
  Description of Artificial Sequence: Synthetic peptide
CQQSYSTCYTF

SEQ ID NO: 302 - protein, 247 aa, Artificial Sequence
  Description of Artificial Sequence: Synthetic polypeptide
EVQLLESGGGLVQPGGSLRLSCAASGFTFSDHGMHWVRQAPGKGLEWVSVIYGGESTYYADSVKGRFTISRDNSKNTLYLQMNSLRAEDTAVYYCARDPAVAGGGIFDYWGQGTLVTVSSGGGGSGGGGSGGGGSGGGGSDIQMTQSPSSLSASVGDRVTITCRASQGISNYLAWYQQKPGKAPKLLIYDASNLETGVPSRFSGSGSGTDFTLTISSLQPEDFATYYCQQSYSTCYTFGQGTKLEIK

SEQ ID NO: 303 - protein, 9 aa, Artificial Sequence
  Description of Artificial Sequence: Synthetic peptide
DTFTGYYIH

SEQ ID NO: 304 - protein, 13 aa, Artificial Sequence
  Description of Artificial Sequence: Synthetic peptide
GWINPNSGGTNYA

SEQ ID NO: 305 - protein, 17 aa, Artificial Sequence
  Description of Artificial Sequence: Synthetic peptide
CARSGLWLGSYYGMDVW

SEQ ID NO: 306 - protein, 11 aa, Artificial Sequence
  Description of Artificial Sequence: Synthetic peptide
RASQTISIWLA

SEQ ID NO: 307 - protein, 7 aa, Artificial Sequence
  Description of Artificial Sequence: Synthetic peptide
DASTLQS

SEQ ID NO: 308 - protein, 11 aa, Artificial Sequence [sequence omitted]

SEQ ID NO: 309 - protein, 249 aa, Artificial Sequence
  Description of Artificial Sequence: Synthetic polypeptide
QVQLVQSGAEVKKPGASVKVSCKASGDTFTGYYIHWVRQAPGQGLEWMGWINPNSGGTNYAQKFQGRVTMTRDTSTSTVYMELSSLRSEDTAVYYCARSGLWLGSYYGMDVWGQGTLVTVSSGGGGSGGGGSGGGGSGGGGSDIQMTQSPSSLSASVGDRVTITCRASQTISIWLAWYQQKPGKAPKLLIYDASTLQSGVPSRFSGSGSGTDFTLTISSLQPEDFATYYCQQYSSYPLTFGQGTKVEIK

SEQ ID NO: 310 - protein, 9 aa, Artificial Sequence
  Description of Artificial Sequence: Synthetic peptide
YTFTSYDIN

SEQ ID NO: 311 - protein, 13 aa, Artificial Sequence
  Description of Artificial Sequence: Synthetic peptide
GWINPNSGTTGYA

SEQ ID NO: 312 - protein, 14 aa, Artificial Sequence
  Description of Artificial Sequence: Synthetic peptide
CARSPYYYYGMDVW

SEQ ID NO: 313 - protein, 11 aa, Artificial Sequence
  Description of Artificial Sequence: Synthetic peptide
RASHFISRWVA

SEQ ID NO: 314 - protein, 10 aa, Artificial Sequence
  Description of Artificial Sequence: Synthetic peptide
CQQSYSGISF

SEQ ID NO: 315 - protein, 245 aa, Artificial Sequence
  Description of Artificial Sequence: Synthetic polypeptide
QVQLVQSGAEVKKPGASVKVSCKASGYTFTSYDINWVRQAPGQGLEWMGWINPNSGTTGYAQKFQGRVTMTRDTSTSTVYMELSSLRSEDTAVYYCARSPYYYYGMDVWGQGTTVTVSSGGGGSGGGGSGGGGSGGGGSDIQMTQSPSSLSASVGDRVTITCRASHFISRWVAWYQQKPGKAPKLLIYAASTLQSGVPSRFSGSGSGTDFTLTISSLQPEDFATYYCQQSYSGISFGPGTKVDIK

SEQ ID NO: 316 - protein, 9 aa, Artificial Sequence
  Description of Artificial Sequence: Synthetic peptide
FTFNNYGMN

SEQ ID NO: 317 - protein, 13 aa, Artificial Sequence
  Description of Artificial Sequence: Synthetic peptide
SRINSDGSSTSYA

SEQ ID NO: 318 - protein, 14 aa, Artificial Sequence [sequence omitted]

SEQ ID NO: 319 - protein, 12 aa, Artificial Sequence
  Description of Artificial Sequence: Synthetic peptide
RASQSVSGSYLA

SEQ ID NO: 320 - protein, 7 aa, Artificial Sequence
  Description of Artificial Sequence: Synthetic peptide
ATSSRAS

SEQ ID NO: 321 - protein, 10 aa, Artificial Sequence
  Description of Artificial Sequence: Synthetic peptide
CQQYYSGLTF

SEQ ID NO: 322 - protein, 246 aa, Artificial Sequence
  Description of Artificial Sequence: Synthetic polypeptide
EVQLLESGGGLVQPGGSLRLSCAASGFTFNNYGMNWVRQAPGKGLEWVSRINSDGSSTSYADSVKGRFTISRDNSKNTLYLQMNSLRAEDTAVYYCARGAYYYYYMDVWGQGTLVTVSSGGGGSGGGGSGGGGSGGGGSEIVMTQSPATLSVSPGERATLSCRASQSVSGSYLAWYQQKPGQAPRLLIYATSSRASGIPARFSGSGSGTEFTLTISSLQSEDFAVYYCQQYYSGLTFGQGTKVEIK

SEQ ID NO: 323 - protein, 9 aa, Artificial Sequence
  Description of Artificial Sequence: Synthetic peptide
FTFSNSDMN

SEQ ID NO: 324 - protein, 13 aa, Artificial Sequence
  Description of Artificial Sequence: Synthetic peptide
AHIWNDGSQKYYA

SEQ ID NO: 325 - protein, 17 aa, Artificial Sequence
  Description of Artificial Sequence: Synthetic peptide
CARDRTDPGYSSAMDVW

SEQ ID NO: 326 - protein, 11 aa, Artificial Sequence
  Description of Artificial Sequence: Synthetic peptide
RASQDIRNYLG

SEQ ID NO: 327 - protein, 7 aa, Artificial Sequence
  Description of Artificial Sequence: Synthetic peptide
DASSLET

SEQ ID NO: 328 - protein, 11 aa, Artificial Sequence
  Description of Artificial Sequence: Synthetic peptide
CQQATSLPLTF

SEQ ID NO: 329 - protein, 249 aa, Artificial Sequence
  Description of Artificial Sequence: Synthetic polypeptide
EVQLLESGGGLVQPGGSLRLSCAASGFTFSNSDMNWVRQAPGKGLEWVAHIWNDGSQKYYADSVKGRFTISRDNSKNTLYLQMNSLRAEDTAVYYCARDRTDPGYSSAMDVWGQGTTVTVSSGGGGSGGGGSGGGGSGGGGSDIQMTQSPSSLSASVGDRVTITCRASQDIRNYLGWYQQKPGKAPKLLIYDASSLETGVPSRFSGSGSGTDFTLTISSLQPEDFATYYCQQATSLPLTFGGGTKVEIK

SEQ ID NO: 330 - protein, 15 aa, Artificial Sequence
  Description of Artificial Sequence: Synthetic peptide
CAKDSDYSNLLWDYW

SEQ ID NO: 331 - protein, 11 aa, Artificial Sequence
  Description of Artificial Sequence: Synthetic peptide
RASQDITNDLG

SEQ ID NO: 332 - protein, 7 aa, Artificial Sequence
  Description of Artificial Sequence: Synthetic peptide
QASSLES

SEQ ID NO: 333 - protein, 11 aa, Artificial Sequence [sequence omitted]

SEQ ID NO: 334 - protein, 247 aa, Artificial Sequence
  Description of Artificial Sequence: Synthetic polypeptide
QVQLVQSGAEVKKPGASVKVSCKASGYTFTSYDINWVRQAPGQGLEWMGWMNPNSGNTGYAQKFQGRVTMTRDTSTSTVYMELSSLRSEDTAVYYCAKDSDYSNLLWDYWGQGTLVTVSSGGGGSGGGGSGGGGSGGGGSDIQMTQSPSSLSASVGDRVTITCRASQDITNDLGWYQQKPGKAPKLLIYQASSLESGVPSRFSGSGSGTDFTLTISSLQPEDFATYYCQQSYTIPLTFGQGTKVEIK

SEQ ID NO: 335 - protein, 13 aa, Artificial Sequence
  Description of Artificial Sequence: Synthetic peptide
AVVSYDGTNKYYA

SEQ ID NO: 336 - protein, 16 aa, Artificial Sequence
  Description of Artificial Sequence: Synthetic peptide
CAKDICSSTSCYFDLW

SEQ ID NO: 337 - protein, 11 aa, Artificial Sequence
  Description of Artificial Sequence: Synthetic peptide
RASQNINNYVN

SEQ ID NO: 338 - protein, 11 aa, Artificial Sequence [sequence omitted]

SEQ ID NO: 339 - protein, 248 aa, Artificial Sequence
  Description of Artificial Sequence: Synthetic polypeptide
EVQLLESGGGLVQPGGSLRLSCAASGFTFGDYAMSWVRQAPGKGLEWVAVVSYDGTNKYYADSVKGRFTISRDNSKNTLYLQMNSLRAEDTAVYYCAKDICSSTSCYFDLWGRGTLVTVSSGGGGSGGGGSGGGGSGGGGSDIQMTQSPSSLSASVGDRVTITCRASQNINNYVNWYQQKPGKAPKLLIYDASNLETGVPSRFSGSGSGTDFTLTISSLQPEDFATYYCQQANSFPPTFGQGTRLEIK

SEQ ID NO: 340 - protein, 13 aa, Artificial Sequence
  Description of Artificial Sequence: Synthetic peptide
GIIDPSGGSTSYA

SEQ ID NO: 341 - protein, 17 aa, Artificial Sequence
  Description of Artificial Sequence: Synthetic peptide
CAREEWSSGGVGYFDYW

SEQ ID NO: 342 - protein, 11 aa, Artificial Sequence
  Description of Artificial Sequence: Synthetic peptide
RASQGISSYLA

SEQ ID NO: 343 - protein, 7 aa, Artificial Sequence
  Description of Artificial Sequence: Synthetic peptide
ATSSLQT

SEQ ID NO: 344 - protein, 11 aa, Artificial Sequence [sequence omitted]

SEQ ID NO: 345 - protein, 249 aa, Artificial Sequence
  Description of Artificial Sequence: Synthetic polypeptide
QVQLVQSGAEVKKPGASVKVSCKASGYTFTSYYMHWVRQAPGQGLEWMGIIDPSGGSTSYAQKFQGRVTMTRDTSTSTVYMELSSLRSEDTAVYYCAREEWSSGGVGYFDYWGQGTLVTVSSGGGGSGGGGSGGGGSGGGGSDIQMTQSPSSLSASVGDRVTITCRASQGISSYLAWYQQKPGKAPKLLIYATSSLQTGVPSRFSGSGSGTDFTLTISSLQPEDFATYYCQQTYSIPITFGQGTRLEIK

SEQ ID NO: 346 - protein, 13 aa, Artificial Sequence
  Description of Artificial Sequence: Synthetic peptide
SAISGGGEDTYYA

SEQ ID NO: 347 - protein, 7 aa, Artificial Sequence
  Description of Artificial Sequence: Synthetic peptide
KASSLES

SEQ ID NO: 348 - protein, 11 aa, Artificial Sequence
  Description of Artificial Sequence: Synthetic peptide
CQQANSYPVTF

SEQ ID NO: 349 - protein, 248 aa, Artificial Sequence
  Description of Artificial Sequence: Synthetic polypeptide
EVQLLESGGGLVQPGGSLRLSCAASGFTFDDYAMHWVRQAPGKGLEWVSAISGGGEDTYYADSVKGRFTISRDNSKNTLYLQMNSLRAEDTAVYYCARDASYGGNYGMDVWGQGTTVTVSSGGGGSGGGGSGGGGSGGGGSDIQMTQSPSSLSASVGDRVTITCQASQDIRNYLNWYQQKPGKAPKLLIYKASSLESGVPSRFSGSGSGTDFTLTISSLQPEDFATYYCQQANSYPVTFGGGTKVEIK

SEQ ID NO: 350 - protein, 19 aa, Artificial Sequence
  Description of Artificial Sequence: Synthetic peptide
CARDSVAGTGGRYYGMDVW

SEQ ID NO: 351 - protein, 11 aa, Artificial Sequence
  Description of Artificial Sequence: Synthetic peptide
RASQGISNYFA

SEQ ID NO: 352 - protein, 7 aa, Artificial Sequence
  Description of Artificial Sequence: Synthetic peptide
AASSLQG

SEQ ID NO: 353 - protein, 11 aa, Artificial Sequence [sequence omitted]

SEQ ID NO: 354 - protein, 251 aa, Artificial Sequence
  Description of Artificial Sequence: Synthetic polypeptide
QVQLVQSGAEVKKPGASVKVSCKASGYTFTSYYMHWVRQAPGQGLEWMGIINPSGGSTSYAQKFQGRVTMTRDTSTSTVYMELSSLRSEDTAVYYCARDSVAGTGGRYYGMDVWGQGTLVTVSSGGGGSGGGGSGGGGSGGGGSDIQMTQSPSSLSASVGDRVTITCRASQGISNYFAWYQQKPGKAPKLLIYAASSLQGGVPSRFSGSGSGTDFTLTISSLQPEDFATYYCQQSYSLPYTFGQGTKLEIK

SEQ ID NO: 355 - protein, 13 aa, Artificial Sequence
  Description of Artificial Sequence: Synthetic peptide
GIINPSGGNTKYA

SEQ ID NO: 356 - protein, 13 aa, Artificial Sequence
  Description of Artificial Sequence: Synthetic peptide
CTTADYYYYMDVW

SEQ ID NO: 357 - protein, 10 aa, Artificial Sequence
  Description of Artificial Sequence: Synthetic peptide
CQQYYSNADF

SEQ ID NO: 358 - protein, 244 aa, Artificial Sequence
  Description of Artificial Sequence: Synthetic polypeptide
QVQLVQSGAEVKKPGASVKVSCKASGYTFTGYYMHWVRQAPGQGLEWMGIINPSGGNTKYAQKFQGRVTMTRDTSTSTVYMELSSLRSEDTAVYYCTTADYYYYMDVWGKGTTVTVSSGGGGSGGGGSGGGGSGGGGSDIQMTQSPSSLSASVGDRVTITCRASQGISNYLAWYQQKPGKAPKLLIYAASSLQSGVPSRFSGSGSGTDFTLTISSLQPEDFATYYCQQYYSNADFGQGTKVEIK

SEQ ID NO: 359 - protein, 9 aa, Artificial Sequence
  Description of Artificial Sequence: Synthetic peptide
FTFSDFWMH

SEQ ID NO: 360 - protein, 14 aa, Artificial Sequence [sequence omitted]

SEQ ID NO: 361 - protein, 11 aa, Artificial Sequence
  Description of Artificial Sequence: Synthetic peptide
RASQSVSRSLA

SEQ ID NO: 362 - protein, 5 aa, Artificial Sequence
  Description of Artificial Sequence: Synthetic peptide
SSLQS

SEQ ID NO: 363 - protein, 9 aa, Artificial Sequence
  Description of Artificial Sequence: Synthetic peptide
QQYKSYPVT

SEQ ID NO: 364 - protein, 246 aa, Artificial Sequence
  Description of Artificial Sequence: Synthetic polypeptide
EVQLLESGGGLVQPGGSLRLSCAASGFTFSDFWMHWVRQAPGKGLEWISYISGDSGYTNYADSVKGRFTISRDNSKNTLYLQMNSLRAEDTAVYYCARDRPYYYYMDVWGKGTTVTVSSGGGGSGGGGSGGGGSGGGGSDIQMTQSPSSLSASVGDRVTITCRASQSVSRSLAWYQQKPGKAPKLLIYAASSLQSGVPSRFSGSGSGTDFTLTISSLQPEDFATYYCQQYKSYPVTFGQGTKVEIK

SEQ ID NO: 365 - protein, 9 aa, Artificial Sequence
  Description of Artificial Sequence: Synthetic peptide
FTFDDYTMH

SEQ ID NO: 366 - protein, 13 aa, Artificial Sequence
  Description of Artificial Sequence: Synthetic peptide
SDISGSGGSTYYA

SEQ ID NO: 367 - protein, 17 aa, Artificial Sequence
  Description of Artificial Sequence: Synthetic peptide
CAKDVVVAGTPLHFDYW

SEQ ID NO: 368 - protein, 5 aa, Artificial Sequence
  Description of Artificial Sequence: Synthetic peptide
SYLQS

SEQ ID NO: 369 - protein, 9 aa, Artificial Sequence
  Description of Artificial Sequence: Synthetic peptide
QQAHNYPIT

SEQ ID NO: 370 - protein, 249 aa, Artificial Sequence
  Description of Artificial Sequence: Synthetic polypeptide
EVQLLESGGGLVQPGGSLRLSCAASGFTFDDYTMHWVRQAPGKGLEWVSDISGSGGSTYYADSVKGRFTISRDNSKNTLYLQMNSLRAEDTAVYYCAKDVVVAGTPLHFDYWGQGTLVTVSSGGGGSGGGGSGGGGSGGGGSDIQMTQSPSSLSASVGDRVTITCQASQDISNYLNWYQQKPGKAPKLLIYAASYLQSGVPSRFSGSGSGTDFTLTISSLQPEDFATYYCQQAHNYPITFGQGTRLEIK

SEQ ID NO: 371 - protein, 13 aa, Artificial Sequence
  Description of Artificial Sequence: Synthetic peptide
ASISSTSAYIDYA

SEQ ID NO: 372 - protein, 14 aa, Artificial Sequence
  Description of Artificial Sequence: Synthetic peptide
CAREVVGATTFDYW

SEQ ID NO: 373 - protein, 11 aa, Artificial Sequence
  Description of Artificial Sequence: Synthetic peptide
RASQSISTWLA

SEQ ID NO: 374 - protein, 9 aa, Artificial Sequence
  Description of Artificial Sequence: Synthetic peptide
QQANAFPPT

SEQ ID NO: 375 - protein, 246 aa, Artificial Sequence
  Description of Artificial Sequence: Synthetic polypeptide
EVQLLESGGGLVQPGGSLRLSCAASEFTFSNAWMSWVRQAPGKGLEWVASISSTSAYIDYADSVKGRFTISRDNSKNTLYLQMNSLRAEDTAVYYCAREVVGATTFDYWGQGTLVTVSSGGGGSGGGGSGGGGSGGGGSDIQMTQSPSSLSASVGDRVTITCRASQSISTWLAWYQQKPGKAPKLLIYAASSLQSGVPSRFSGSGSGTDFTLTISSLQPEDFATYYCQQANAFPPTFGQGTRLEIK

SEQ ID NO: 376 - protein, 13 aa, Artificial Sequence
  Description of Artificial Sequence: Synthetic peptide
GWMEPHTGNTRYA

SEQ ID NO: 377 - protein, 12 aa, Artificial Sequence
  Description of Artificial Sequence: Synthetic peptide
CAKGGFSWFDPW

SEQ ID NO: 378 - protein, 5 aa, Artificial Sequence
  Description of Artificial Sequence: Synthetic peptide
STRES

SEQ ID NO: 379 - protein, 9 aa, Artificial Sequence
  Description of Artificial Sequence: Synthetic peptide
QQYYSTPPT

SEQ ID NO: 380 - protein, 250 aa, Artificial Sequence
  Description of Artificial Sequence: Synthetic polypeptide
QVQLVQSGAEVKKPGSSVKVSCKASGGTFSSYAISWVRQAPGQGLEWMGWMEPHTGNTRYAQKFQGRVTITADESTSTAYMELSSLRSEDTAVYYCAKGGFSWFDPWGQGTLVTVSSGGGGSGGGGSGGGGSGGGGSDIVMTQSPDSLAVSLGERATINCKSSQSVLYSSNNKNYLAWYQQKPGQPPKLLIYWASTRESGVPDRFSGSGSGTDFTLTISSLQAEDVAVYYCQQYYSTPPTFGQGTRLEIK

SEQ ID NO: 381 - protein, 13 aa, Artificial Sequence
  Description of Artificial Sequence: Synthetic peptide
ASITSSSAFIDYA

SEQ ID NO: 382 - protein, 15 aa, Artificial Sequence
  Description of Artificial Sequence: Synthetic peptide
CARERVDWNSYFDLW

SEQ ID NO: 383 - protein, 12 aa, Artificial Sequence
  Description of Artificial Sequence: Synthetic peptide
RASQGISNSYLA

SEQ ID NO: 384 - protein, 5 aa, Artificial Sequence
  Description of Artificial Sequence: Synthetic peptide
STRAT

SEQ ID NO: 385 - protein, 9 aa, Artificial Sequence
  Description of Artificial Sequence: Synthetic peptide
QQYYTYPPT

SEQ ID NO: 386 - protein, 248 aa, Artificial Sequence
  Description of Artificial Sequence: Synthetic polypeptide
EVQLLESGGGLVKPGGSLRLSCAASGFTFDDYAMHWVRQAPGKGLEWVASITSSSAFIDYAASVKGRFTISRDDSKNTLYLQMNSLKTEDTAVYYCARERVDWNSYFDLWGRGTLVTVSSGGGGSGGGGSGGGGSGGGGSEIVMTQSPATLSVSPGERATLSCRASQGISNSYLAWYQQKPGQAPRLLIYGASTRATGIPARFSGSGSGTEFTLTISSLQSEDFAVYYCQQYYTYPPTFGPGTKVDIK

SEQ ID NO: 387 - protein, 9 aa, Artificial Sequence
  Description of Artificial Sequence: Synthetic peptide
FAFSSHWMH

SEQ ID NO: 388 - protein, 13 aa, Artificial Sequence
  Description of Artificial Sequence: Synthetic peptide
AGTSGSGESRDYA

SEQ ID NO: 389 - protein, 14 aa, Artificial Sequence
  Description of Artificial Sequence: Synthetic peptide
CARETYYYYYMDVW

SEQ ID NO: 390 - protein, 5 aa, Artificial Sequence
  Description of Artificial Sequence: Synthetic peptide
ANLEG

SEQ ID NO: 391 - protein, 9 aa, Artificial Sequence
  Description of Artificial Sequence: Synthetic peptide
QQSDIFPPT

SEQ ID NO: 392 - protein, 246 aa, Artificial Sequence
  Description of Artificial Sequence: Synthetic polypeptide
EVQLLESGGGLVKPGGSLRLSCAASGFAFSSHWMHWVRQAPGKGLEWVAGTSGSGESRDYADFVKGRFTISRDDSKNTLYLQMNSLKTEDTAVYYCARETYYYYYMDVWGKGTTVTVSSGGGGSGGGGSGGGGSGGGGSDIQMTQSPSSLSASVGDRVTITCRASQGISNYLAWYQQKPGKAPKLLIYDAANLEGGVPSRFSGSGSGTDFTLTISSLQPEDFATYYCQQSDIFPPTFGQGTKVEIK

SEQ ID NO: 393 - protein, 9 aa, Artificial Sequence
  Description of Artificial Sequence: Synthetic peptide
YTFTRHWIH

SEQ ID NO: 394 - protein, 13 aa, Artificial Sequence
  Description of Artificial Sequence: Synthetic peptide
GWINVKTGGAGYA

SEQ ID NO: 395 - protein, 14 aa, Artificial Sequence
  Description of Artificial Sequence: Synthetic peptide
CARESSGWYGTDVW

SEQ ID NO: 396 - protein, 11 aa, Artificial Sequence
  Description of Artificial Sequence: Synthetic peptide
RASQSISNYLA

SEQ ID NO: 397 - protein, 9 aa, Artificial Sequence
  Description of Artificial Sequence: Synthetic peptide
QQSNSFPLT

SEQ ID NO: 398 - protein, 246 aa, Artificial Sequence
  Description of Artificial Sequence: Synthetic polypeptide
QVQLVQSGAEVKKPGASVKVSCKASGYTFTRHWIHWVRQAPGQGLEWMGWINVKTGGAGYAQKFQGRVTMTRDTSTSTVYMELSSLRSEDTAVYYCARESSGWYGTDVWGQGTTVTVSSGGGGSGGGGSGGGGSGGGGSDIQMTQSPSSLSASVGDRATITCRASQSISNYLAWYQQKPGKAPKLLIYAASSLQSGVPSRFSGSGSGTDFTLTISSLQPEDFATYYCQQSNSFPLTFGGGTKVEIK

SEQ ID NO: 399 - protein, 13 aa, Artificial Sequence
  Description of Artificial Sequence: Synthetic peptide
AAISYDGKYKDYE

SEQ ID NO: 400 - protein, 15 aa, Artificial Sequence
  Description of Artificial Sequence: Synthetic peptide
CARENKQWLASFDYW

SEQ ID NO: 401 - protein, 11 aa, Artificial Sequence
  Description of Artificial Sequence: Synthetic peptide
QASQDISNFVN

SEQ ID NO: 402 - protein, 4 aa, Artificial Sequence
  Description of Artificial Sequence: Synthetic peptide
NLRS

SEQ ID NO: 403 - protein, 9 aa, Artificial Sequence
  Description of Artificial Sequence: Synthetic peptide
QQANSFPVT

SEQ ID NO: 404 - protein, 246 aa, Artificial Sequence
  Description of Artificial Sequence: Synthetic polypeptide
EVQLLESGGGLVQPGGSLRLSCAASGFTFSSYWMHWVRQAPGKGLEWVAAISYDGKYKDYEDSVKGRFTISRDNSKNTLYLQMNSLRAEDTAVYYCARENKQWLASFDYWGQGTLVTVSSGGGGSGGGGSGGGGSGGGGSDIQMTQSPSSLSASVGDRVTITCQASQDISNFVNWYQQKPGKAPKLLIYAANLRSGVPSRFSGSGSGTDFTLTISSLQPEDFATYYCQQANSFPVTFGPGTKVDIK

SEQ ID NO: 405 - protein, 120 aa, Artificial Sequence
  Description of Artificial Sequence: Synthetic polypeptide
EVQLLESGGGLVQPGGSLRLSCAASGFTFSSYGMHWVRQAPGKGLEWVAVISDDGSDKYYADSVKGRFTISRDNSKNTLYLQMNSLRAEDTAVYYCTTSKYYYYYGMDVWGQGTTVTVSS

SEQ ID NO: 406 - protein, 107 aa, Artificial Sequence
  Description of Artificial Sequence: Synthetic polypeptide
DIQMTQSPSSLSASVGDRVTITCQASQDISKSLNWYQQKPGKAPKLLIYAASSLQSGVPSRFSGSGSGTDFTLTISSLQPEDFATYYCQQGYSTPLTFGGGTKVEIK

SEQ ID NO: 407 - protein, 119 aa, Artificial Sequence
  Description of Artificial Sequence: Synthetic polypeptide
QVQLVQSGAEVKKPGASVKVSCKASGYPFIGYYLHWVRQAPGQGLEWMGIINPSGGSTSYAQKFQGRVTMTRDTSTSTVYMELSSLRSEDTAVYYCAREGRLSYGMDAWGQGTLVTVSS

SEQ ID NO: 408 - protein, 107 aa, Artificial Sequence
  Description of Artificial Sequence: Synthetic polypeptide
DIQMTQSPSSLSASVGDRVTITCRASQSISSYLAWYQQKPGKAPKLLIYGASTLESGVPSRFSGSGSGTDFTLTISSLQPEDFATYYCQQTWGPPFTFGQGTKLEIK

SEQ ID NO: 409 - protein, 119 aa, Artificial Sequence
  Description of Artificial Sequence: Synthetic polypeptide
QVQLVQSGAEVKKPGASVKVSCKASGYPFIGQYLHWVRQAPGQGLEWMGIINPSGGSTSYAQKFQGRVTMTRDTSTSTVYMELSSLRSEDTAVYYCAREGRLSYGMDAWGQGTLVTVSS

SEQ ID NO: 410 - protein, 121 aa, Artificial Sequence
  Description of Artificial Sequence: Synthetic polypeptide
QVQLVQSGAEVKKPGASVKVSCKASGGTFSSYAISWVRQAPGQGLEWMGSINPSGDTTSYAQKFQGRVTMTRDTSTSTVYMELSSLRSEDTAVYYCAKDKAQWLVGYFDYWGQGTLVTVSS

SEQ ID NO: 411 - protein, 107 aa, Artificial Sequence
  Description of Artificial Sequence: Synthetic polypeptide
DIQMTQSPSSLSASVGDRVTITCQASQDISNSLNWYQQKPGKAPKLLIYAASSLQSGVPSRFSGSGSGTDFTLTISSLQPEDFATYYCQQSYSSVITFGQGTKVEIK

SEQ ID NO: 412 - protein, 118 aa, Artificial Sequence
  Description of Artificial Sequence: Synthetic polypeptide
EVQLLESGGGLVQPGGSLRLSCAASGFTFSSYWMHWVRQAPGKGLEWVSSISPGGSNIDYADSVKGRFTISRDNSKNTLYLQMNSLRAEDTAVYYCAREVQLSHYDYWGQGTLVTVSS

SEQ ID NO: 413 - protein, 107 aa, Artificial Sequence
  Description of Artificial Sequence: Synthetic polypeptide
DIQMTQSPSSLSASVGDRVTITCRASQGISNSLAWYQQKPGKAPKLLIYGASSLQSGVPSRFSGSGSGTDFTLTISSLQPEDFATYYCQQANSFPFTFGQGTKVEIK

SEQ ID NO: 414 - protein, 121 aa, Artificial Sequence
  Description of Artificial Sequence: Synthetic polypeptide
EVQLLESGGGLVQPGGSLRLSCAASGFTFNNYAFHWVRQAPGKGLEWVSRINSYGTSTTYADSVKGRFTISRDNSKNTLYLQMNSLRAEDTAVYYCAREGPVAGYWYFDLWGQGTLVTVSS

SEQ ID NO: 415 - protein, 107 aa, Artificial Sequence
  Description of Artificial Sequence: Synthetic polypeptide
DIQMTQSPSSLSASVGDRVTITCRASQIIGTNLAWYQQKPGKAPKLLIYGASSLQSGVPSRFSGSGSGTDFTLTISSLQPEDFATYYCQQSYRLPFTFGQGTKVEIK

SEQ ID NO: 416 - protein, 9 aa, Artificial Sequence
  Description of Artificial Sequence: Synthetic peptide
FTFSDYQMS

SEQ ID NO: 417 - protein, 14 aa, Artificial Sequence
  Description of Artificial Sequence: Synthetic peptide
AIISHADGGFKDYA

SEQ ID NO: 418 - protein, 18 aa, Artificial Sequence
  Description of Artificial Sequence: Synthetic peptide
CAKPYSSGWSAVYYFDYW

SEQ ID NO: 419 - protein, 11 aa, Artificial Sequence
  Description of Artificial Sequence: Synthetic peptide
RASRGITNDLG

SEQ ID NO: 420 - protein, 5 aa, Artificial Sequence
  Description of Artificial Sequence: Synthetic peptide
STLQS

SEQ ID NO: 421 - protein, 9 aa, Artificial Sequence
  Description of Artificial Sequence: Synthetic peptide
QQAYSFPWT

SEQ ID NO: 422 - protein, 124 aa, Artificial Sequence
  Description of Artificial Sequence: Synthetic polypeptide
EVQLLESGGGLVQPGGSLRLSCAASGFTFSDYQMSWVRQAPGKGLEWVAIISHADGGFKDYADSVKGRFTISRDNSKNTLYLQMNSLRAEDTAVYYCAKPYSSGWSAVYYFDYWGQGTLVTVSS

SEQ ID NO: 423 - protein, 107 aa, Artificial Sequence
  Description of Artificial Sequence: Synthetic polypeptide
DIQMTQSPSSLSASVGDRVTITCRASRGITNDLGWYQQKPGKAPKLLIYAASTLQSGVPSRFSGSGSGTDFTLTISSLQPEDFATYYCQQAYSFPWTFGQGTKVEIK

SEQ ID NO: 424 - protein, 121 aa, Artificial Sequence
  Description of Artificial Sequence: Synthetic polypeptide
QVQLVQSGAEVKKPGASVKVSCKASGYTFTGYHIHWVRQAPGQGLEWMGIINPSGGSTIYAQKFQGRVTMTRDTSTSTVYMELSSLRSEDTAVYYCAKDWSSWYLGPFDYWGQGTLVTVSS

SEQ ID NO: 425 - protein, 107 aa, Artificial Sequence
  Description of Artificial Sequence: Synthetic polypeptide
DIQMTQSPSSLSASVGDRVTITCRASQNISSSLNWYQQKPGKAPKLLIYAASSLQSGVPSRFSGSGSGTDFTLTISSLQPEDFATYYCQQSYTTPYTFGQGTKVEIK

SEQ ID NO: 426 - protein, 13 aa, Artificial Sequence
  Description of Artificial Sequence: Synthetic peptide
GIINHSGGSTSYA

SEQ ID NO: 427 - protein, 15 aa, Artificial Sequence
  Description of Artificial Sequence: Synthetic peptide
CARPYSGWYFAFDIW

SEQ ID NO: 428 - protein, 11 aa, Artificial Sequence
  Description of Artificial Sequence: Synthetic peptide
RASQSISSSLN

SEQ ID NO: 429 - protein, 9 aa, Artificial Sequence
  Description of Artificial Sequence: Synthetic peptide
QQSYSTPLT

SEQ ID NO: 430 - protein, 120 aa, Artificial Sequence
  Description of Artificial Sequence: Synthetic polypeptide
QVQLVQSGAEVKKPGASVKVSCKASGYTFTSYYMHWVRQAPGQGLEWMGIINHSGGSTSYAQKFQGRVTMTRDTSTSTVYMELSSLRSEDTAVYYCARPYSGWYFAFDIWGQGTLVTVSS

SEQ ID NO: 431 - protein, 107 aa, Artificial Sequence
  Description of Artificial Sequence: Synthetic polypeptide
DIQMTQSPSSLSASVGDRVTITCRASQSISSSLNWYQQKPGKAPKLLIYAASTLQSGVPSRFSGSGSGTDFTLTISSLQPEDFATYYCQQSYSTPLTFGQGTKVEIK

SEQ ID NO: 432 - protein, 121 aa, Artificial Sequence
  Description of Artificial Sequence: Synthetic polypeptide
EVQLLESGGGLVQPGGSLRLSCAASGFMFGDYAMHWVRQAPGKGLEWVSAISGSGGSTYYADSVKGRFTISRDNSKNTLYLQMNSLRAEDTAVYYCAKDLVVAGIWYFDLWGRGTLVTVSS

SEQ ID NO: 433 - protein, 107 aa, Artificial Sequence
  Description of Artificial Sequence: Synthetic polypeptide
DIQMTQSPSSLSASVGDRVTITCRASQGISNNLNWYQQKPGKAPKLLIYDASSLESGVPSRFSGSGSGTDFTLTISSLQPEDFATYYCQQTHSFPSTFGQGTKLEIK

SEQ ID NO: 434 - protein, 123 aa, Artificial Sequence
  Description of Artificial Sequence: Synthetic polypeptide
EVQLLESGGGLVQPGGSLRLSCAASGFTFSDYYMNWVRQAPGKGLEWVSVIGESGGSTYYADSVKGRFTISRDNSKNTLYLQMNSLRAEDTAVYYCAADPVSRWPKHGGGDYWGQGTLVTVSS

SEQ ID NO: 435 - protein, 107 aa, Artificial Sequence
  Description of Artificial Sequence: Synthetic polypeptide
DIQMTQSPSSLSASVGDRVTITCRASQGISSSLAWYQQKPGKAPKLLIYAASTLQSGVPSRFSGSGSGTDFTLTISSLQPEDFATYYCQQSYSTPWTFGQGTKVEIK

SEQ ID NO: 436 - protein, 118 aa, Artificial Sequence
  Description of Artificial Sequence: Synthetic polypeptide
QVQLVQSGAEVKKPGASVKVSCKASGYTLTTWYMYWVRQAPGQGLEWMGWINPNRGATNYAQKFQGRVTMTRDTSTSTVYMELSSLRSEDTAVYYCAKGDLWGAMDVWGQGTLVTVSS

SEQ ID NO: 437 - protein, 107 aa, Artificial Sequence
  Description of Artificial Sequence: Synthetic polypeptide
DIQMTQSPSSLSASVGDRVTITCRASDNIGSWLAWYQQKPGKAPKLLIYAASSLQSGVPSRFSGSGSGTDFTLTISSLQPEDFATYYCQQGYSTPPTFGQGTKVEIK

SEQ ID NO: 438 - protein, 127 aa, Artificial Sequence
  Description of Artificial Sequence: Synthetic polypeptide
QVQLVQSGAEVKKPGASVKVSCKASGYTFTTYYMHWVRQAPGQGLEWMGGFDPEDGETIYAQKFQGRVTMTRDTSTSTVYMELSSLRSEDTAVYYCARHAVAGAVGAGYYYYGMDVWGQGTMVTVSS

SEQ ID NO: 439 - protein, 107 aa, Artificial Sequence
  Description of Artificial Sequence: Synthetic polypeptide
DIQMTQSPSSLSASVGDRVTITCRASESISNWLAWYQQKPGKAPKLLIYAASTLQSGVPSRFSGSGSGTDFTLTISSLQPEDFATYYCQQSYSVPFTFGPGTKVDIK

SEQ ID NO: 440 - protein, 13 aa, Artificial Sequence
  Description of Artificial Sequence: Synthetic peptide
GGIIPIVDGVKYA

SEQ ID NO: 441 - protein, 17 aa, Artificial Sequence
  Description of Artificial Sequence: Synthetic peptide
CAKGQFTGNYYYGMDYW

SEQ ID NO: 442 - protein, 5 aa, Artificial Sequence
  Description of Artificial Sequence: Synthetic peptide
SKLEA

SEQ ID NO: 443 - protein, 9 aa, Artificial Sequence
  Description of Artificial Sequence: Synthetic peptide
QQSSEIPYS

SEQ ID NO: 444 - protein, 122 aa, Artificial Sequence
  Description of Artificial Sequence: Synthetic polypeptide
QVQLVQSGAEVKKPGSSVKVSCKASGYTFTNYYMHWVRQAPGQGLEWMGGIIPIVDGVKYAQKFQGRVTITADESTSTAYMELSSLRSEDTAVYYCAKGQFTGNYYYGMDYWGQGTLVTVSS

SEQ ID NO: 445 - protein, 107 aa, Artificial Sequence
  Description of Artificial Sequence: Synthetic polypeptide
DIQMTQSPSSLSASVGDRVTITCQANQDISNYLNWYQQKPGKAPKLLIYRASKLEAGVPSRFSGSGSGTDFTLTISSLQPEDFATYYCQQSSEIPYSFGQGTKVEIK

SEQ ID NO: 446 - protein, 119 aa, Artificial Sequence
  Description of Artificial Sequence: Synthetic polypeptide
QVQLVQSGAEVKKPGASVKVSCKASGYTFTGYYMHWVRQAPGQGLEWMGWIGPNSGDTNYAQKFQGRVTMTRDTSTSTVYMELSSLRSEDTAVYYCARDLDHNWYFDLWGRGTLVTVSS

SEQ ID NO: 447 - protein, 112 aa, Artificial Sequence
  Description of Artificial Sequence: Synthetic polypeptide
DIVMTQSPLSLPVTPGEPASISCRSSQSLLHSNGYNYLDWYLQKPGQSPQLLIYSSSNRAPGVPDRFSGSGSGTDFTLKISRVEAEDVGVYYCMQALHIPLTFGGGTKVEIK

SEQ ID NO: 448 - protein, 121 aa, Artificial Sequence
  Description of Artificial Sequence: Synthetic polypeptide
EVQLLESGGGLVQPGGSLRLSCAASGFTFDDYAMHWVRQAPGKGLEWVSYIDASGTTIYYADSVKGRFTISRDNSKNTLYLQMNSLRAEDTAVYYCAKDQAAAGYWYFDLWGRGTLVTVSS

SEQ ID NO: 449 - protein, 107 aa, Artificial Sequence
  Description of Artificial Sequence: Synthetic polypeptide
DIQMTQSPSSLSASVGDRVTITCQASQDISNYLNWYQQKPGKAPKLLIYKASTLESGVPSRFSGSGSGTDFTLTISSLQPEDFATYYCQQSYSTPITFGQGTRLEIK

SEQ ID NO: 450 - protein, 120 aa, Artificial Sequence
  Description of Artificial Sequence: Synthetic polypeptide
QVQLVQSGAEVKKPGSSVKVSCKASGYTFTDYHIHWVRQAPGQGLEWMGGIVPRSGSTTYAQKFQGRVTITADESTSTAYMELSSLRSEDTAVYYCAKDESSGWYYFDYWGQGTLVTVSS

SEQ ID NO: 451 - protein, 112 aa, Artificial Sequence
  Description of Artificial Sequence: Synthetic polypeptide
DIVMTQSPLSLPVTPGEPASISCRSSQSLLHSNGYNYLDWYLQKPGQSPQLLIYSAYNRASGVPDRFSGSGSGTDFTLKISRVEAEDVGVYYCMQALQTPLTFGQGTKVEIK

SEQ ID NO: 452 - protein, 122 aa, Artificial Sequence
  Description of Artificial Sequence: Synthetic polypeptide
QVQLVQSGAEVKKPGSSVKVSCKASGYTFTNYYMHWVRQAPGQGLEWMGGIIPIVDRVKYAQKFQGRVTITADESTSTAYMELSSLRSEDTAVYYCAKGRYTVNYYYGMDVWGQGTTVTVSS

SEQ ID NO: 453 - protein, 107 aa, Artificial Sequence
  Description of Artificial Sequence: Synthetic polypeptide
DIQMTQSPSSLSASVGDRVTITCQANQDISNYLNWYQQKPGKAPKLLIYRASKLEAGVPSRFSGSGSGTDFTLTISSLQPEDFATYYCQQSSEIPYSFGQGTKLEIK

SEQ ID NO: 454 - protein, 121 aa, Artificial Sequence
  Description of Artificial Sequence: Synthetic polypeptide
EVQLLESGGGLVQPGGSLRLSCAASGFTFEDYAMHWVRQAPGKGLEWVSYLNSDGGSTSYADSVKGRFTISRDNSKNTLYLQMNSLRAEDTAVYYCAKDYCTNGVCAFDYWGQGTLVTVSS

SEQ ID NO: 455 - protein, 107 aa, Artificial Sequence
  Description of Artificial Sequence: Synthetic polypeptide
DIQMTQSPSSLSASVGDRVTITCRASQSISTYLNWYQQKPGKAPKLLIYDASNLETGVPSRFSGSGSGTDFTLTISSLQPEDFATYYCQQSYTIPITFGQGTRLEIK

SEQ ID NO: 456 - protein, 121 aa, Artificial Sequence
  Description of Artificial Sequence: Synthetic polypeptide
EVQLLESGGGLVQPGGSLRLSCAASGFTFSDSAMHWVRQAPGKGLEWVSAISGSGSTIYYADSVKGRFTISRDNSKNTLYLQMNSLRAEDTAVYYCVSDIAVAGHWYFDLWGRGTLVTVSS

SEQ ID NO: 457 - protein, 107 aa, Artificial Sequence
  Description of Artificial Sequence: Synthetic polypeptide
DIQMTQSPSSLSASVGDRVTITCRASQSISTFLNWYQQKPGKAPKLLIYAASRLEGGVPSRFSGSGSGTDFTLTISSLQPEDFATYYCQQANSFPLTFGPGTKVDIK

SEQ ID NO: 458 - protein, 122 aa, Artificial Sequence
  Description of Artificial Sequence: Synthetic polypeptide
EVQLVESGGGLVKPGGSLRLSCAASGFTFSSYWMSWVRQAPGKGLEWVSYISGDSGYTNYAAPVKGRFTISRDDSKNTLYLQMNSLKTEDTAVYYCARANSSGWYDWYFDLWGRGTLVTVSS

SEQ ID NO: 459 - protein, 107 aa, Artificial Sequence [sequence omitted]

SEQ ID NO: 460 - protein, 123 aa, Artificial Sequence
  Description of Artificial Sequence: Synthetic polypeptide
EVQLLESGGGLVQPGGSLRLSCAASGFTFDDYAMHWVRQAPGKGLEWVSGISWNSGSIGYADSVKGRFTISRDNSKNTLYLQMNSLRAEDTAVYYCAKDIVAAGHYYYGMDVWGQGTTVTVSS

SEQ ID NO: 461 - protein, 107 aa, Artificial Sequence
  Description of Artificial Sequence: Synthetic polypeptide
DIQMTQSPSSLSASVGDRVTITCQASQDISNYLNWYQQKPGKAPKLLIYDASNLETGVPSRFSGSGSGTDFTLTISSLQPEDFATYYCQQSYSTPLTFGGGTKVEIK

SEQ ID NO: 462 - protein, 121 aa, Artificial Sequence
  Description of Artificial Sequence: Synthetic polypeptide
EVQLLESGGGLVQPGGSLRLSCAASGFTFDDYAMHWVRQAPGKGLEWVSYIDTSSSHLYYADSVKGRFTISRDNSKNTLYLQMNSLRAEDTAVYYCARDEAAAGYYGMDVWGQGTTVTVSS

SEQ ID NO: 463 - protein, 107 aa, Artificial Sequence
  Description of Artificial Sequence: Synthetic polypeptide
DIQMTQSPSSLSASVGDRVTITCQAGQDISNYLNWYQQKPGKAPKLLIYDASNLETGVPSRFSGSGSGTDFTLTISSLQPEDFATYYCQQTYSTPITFGQGTKLEIK

SEQ ID NO: 464 - protein, 13 aa, Artificial Sequence
  Description of Artificial Sequence: Synthetic peptide
SRISSDGRITTYA

SEQ ID NO: 465 - protein, 18 aa, Artificial Sequence
  Description of Artificial Sequence: Synthetic peptide
CARGTSYCTGGVCDIDYW

SEQ ID NO: 466 - protein, 11 aa, Artificial Sequence
  Description of Artificial Sequence: Synthetic peptide
RASQSIGRNLN

SEQ ID NO: 467 - protein, 5 aa, Artificial Sequence
  Description of Artificial Sequence: Synthetic peptide
SNLQS

SEQ ID NO: 468 - protein, 9 aa, Artificial Sequence
  Description of Artificial Sequence: Synthetic peptide
QQSYSIPLT

SEQ ID NO: 469 - protein, 123 aa, Artificial Sequence
  Description of Artificial Sequence: Synthetic polypeptide
EVQLVESGGGLVKPGGSLRLSCAASGFTFSSYWMSWVRQAPGKGLEWVSRISSDGRITTYAAPVKGRFTISRDDSKNTLYLQMNSLKTEDTAVYYCARGTSYCTGGVCDIDYWGQGTLVTVSS

SEQ ID NO: 470 - protein, 107 aa, Artificial Sequence
  Description of Artificial Sequence: Synthetic polypeptide
DIQMTQSPSSLSASVGDRVTITCRASQSIGRNLNWYQQKPGKAPKLLIYSASNLQSGVPSRFSGSGSGTDFTLTISSLQPEDFATYYCQQSYSIPLTFGPGTKVDIK

SEQ ID NO: 471 - protein, 120 aa, Artificial Sequence
  Description of Artificial Sequence: Synthetic polypeptide
EVQLLESGGGLVQPGGSLRLSCAASGFTFSNAWMSWVRQAPGKGLEWVSTIVGNGGATYYADSVKGRFTISRDNSKNTLYLQMNSLRAEDTAVYYCARDNPLRWQGMDVWGQGTLVTVSS

SEQ ID NO: 472 - protein, 107 aa, Artificial Sequence
  Description of Artificial Sequence: Synthetic polypeptide
DIQMTQSPSSLSASVGDRVTITCRASQDISNYLNWYQQKPGKAPKLLIYAASSLQSGVPSRFSGSGSGTDFTLTISSLQPEDFATYYCQQSYSIPPTFGPGTKVDIK

SEQ ID NO: 473 - protein, 9 aa, Artificial Sequence
  Description of Artificial Sequence: Synthetic peptide
FTFSSYAMS

SEQ ID NO: 474 - protein, 5 aa, Artificial Sequence
  Description of Artificial Sequence: Synthetic peptide
SGLQS

SEQ ID NO: 475 - protein, 122 aa, Artificial Sequence
  Description of Artificial Sequence: Synthetic polypeptide
EVQLLESGGGLVQPGGSLRLSCAASGFTFSSYAMSWVRQAPGKGLEWVSYISSSSTYTNYADSVKGRFTISRDNSKNTLYLQMNSLRAEDTAVYYCARANSSSWYDWYFDLWGQGTLVTVSS

SEQ ID NO: 476 - protein, 107 aa, Artificial Sequence
  Description of Artificial Sequence: Synthetic polypeptide
DIQMTQSPSSLSASVGDRVTITCRASQSISSYLNWYQQKPGKAPKLLIYAASGLQSGVPSRFSGSGSGTDFTLTISSLQPEDFATYYCQQSYSTPLTFGGGTKVEIK

SEQ ID NO: 477 - protein, 122 aa, Artificial Sequence
  Description of Artificial Sequence: Synthetic polypeptide
EVQLLESGGGLVQPGGSLRLSCAASGFTFSSYQMSWVRQAPGKGLEWVSYISSSSTYTNYADSVKGRFTISRDNSKNTLYLQMNSLRAEDTAVYYCARANSSSWYDWYFDLWGQGTLVTVSS

SEQ ID NO: 478 - protein, 123 aa, Artificial Sequence
  Description of Artificial Sequence: Synthetic polypeptide
EVQLLESGGGLVQPGGSLRLSCAASGFTFSSYAMHWVRQAPGKGLEWVSGISGSGGSAYYADSVKGRFTISRDNSKNTLYLQMNSLRAEDTAVYYCATSQAPVDYYYYGMDVWGQGTTVTVSS

SEQ ID NO: 479 - protein, 107 aa, Artificial Sequence
  Description of Artificial Sequence: Synthetic polypeptide
DIQMTQSPSSLSASVGDRVTITCRASQSISSWLAWYQQKPGKAPKLLIYAASNLQRGVPSRFSGSGSGTDFTLTISSLQPEDFATYYCQQSYSIPITFGQGTKVEIK

SEQ ID NO: 480 - protein, 122 aa, Artificial Sequence
  Description of Artificial Sequence: Synthetic polypeptide
EVQLVESGGGLVKPGGSLRLSCAASGFTFSSYWMSWVRQAPGKGLEWVSYISGSSSYTNYAAPVKGRFTISRDDSKNTLYLQMNSLKTEDTAVYYCARVGSSGWYDWYFDLWGRGTLVTVSS

SEQ ID NO: 481 - protein, 107 aa, Artificial Sequence [sequence omitted]

SEQ ID NO: 482 - protein, 118 aa, Artificial Sequence
  Description of Artificial Sequence: Synthetic polypeptide
QVQLVQSGAEVKKPGASVKVSCKASGYTLTTWYMYWVRQAPGQGLEWMGWINPNRGATNYAQKFQGRVTMTRDTSTSTVYMELSSLRSEDTAVYYCAKGDLWGAMDVWGQGTTVTVSS

SEQ ID NO: 483 - protein, 129 aa, Artificial Sequence
  Description of Artificial Sequence: Synthetic polypeptide
QVQLVQSGAEVKKPGASVKVSCKASGYTFTGYYIHWVRQAPGQGLEWMGWMNPNSGNTGYAQKFQGRVTMTRDTSTSTVYMELSSLRSEDTAVYYCARDPGFLGYCSGGSCYDGWFDPWGQGTLVTVSS

SEQ ID NO: 484 - protein, 107 aa, Artificial Sequence
  Description of Artificial Sequence: Synthetic polypeptide
DIQMTQSPSSLSASVGDRVTITCRASQSISSYLHWYQQKPGKAPKLLIYAASSLQSGVPSRFSGSGSGTDFTLTISSLQPEDFATYYCQQSYTAPYTFGQGTKLEIK

SEQ ID NO: 485 - protein, 24 aa, Artificial Sequence
  Description of Artificial Sequence: Synthetic peptide
CARDPGFLGYSSGGSCYDGWFDPW

SEQ ID NO: 486 - protein, 129 aa, Artificial Sequence
  Description of Artificial Sequence: Synthetic polypeptide
QVQLVQSGAEVKKPGASVKVSCKASGYTFTGYYIHWVRQAPGQGLEWMGWMNPNSGNTGYAQKFQGRVTMTRDTSTSTVYMELSSLRSEDTAVYYCARDPGFLGYSSGGSSYDGWFDPWGQGTLVTVSS

SEQ ID NO: 487 - protein, 9 aa, Artificial Sequence
  Description of Artificial Sequence: Synthetic peptide
FTFDDYALH

SEQ ID NO: 488 - protein, 13 aa, Artificial Sequence
  Description of Artificial Sequence: Synthetic peptide
SAISGDGRSTTYA

SEQ ID NO: 489 - protein, 17 aa, Artificial Sequence
  Description of Artificial Sequence: Synthetic peptide
CARDGTVNGATGWFDPW

SEQ ID NO: 490 - protein, 11 aa, Artificial Sequence
  Description of Artificial Sequence: Synthetic peptide
QASQDISKYLN

SEQ ID NO: 491 - protein, 5 aa, Artificial Sequence
  Description of Artificial Sequence: Synthetic peptide
SNLET

SEQ ID NO: 492 - protein, 9 aa, Artificial Sequence
  Description of Artificial Sequence: Synthetic peptide
QQSYSIPFT

SEQ ID NO: 493 - protein, 122 aa, Artificial Sequence
  Description of Artificial Sequence: Synthetic polypeptide
EVQLLESGGGLVQPGGSLRLSCAASGFTFDDYALHWVRQAPGKGLEWVSAISGDGRSTTYADSVKGRFTISRDNSKNTLYLQMNSLRAEDTAVYYCARDGTVNGATGWFDPWGQGTLVTVSS

SEQ ID NO: 494 - protein, 107 aa, Artificial Sequence
  Description of Artificial Sequence: Synthetic polypeptide
DIQMTQSPSSLSASVGDRVTITCQASQDISKYLNWYQQKPGKAPKLLIYDASNLETGVPSRFSGSGSGTDFTLTISSLQPEDFATYYCQQSYSIPFTFGPGTKVDIK

SEQ ID NO: 495 - protein, 9 aa, Artificial Sequence
  Description of Artificial Sequence: Synthetic peptide
FTFSDYGMP

SEQ ID NO: 496 - protein, 121 aa, Artificial Sequence
  Description of Artificial Sequence: Synthetic polypeptide
EVQLLESGGGLVQPGGSLRLSCAASGFTFSDYGMPWVRQAPGKGLEWVSAISGSGGSTYYADSVKGRFTISRDNSKNTLYLQMNSLRAEDTAVYYCARDGGWQPAAILDYWGQGTLVTVSS

SEQ ID NO: 497 - protein, 107 aa, Artificial Sequence
  Description of Artificial Sequence: Synthetic polypeptide
DIQMTQSPSSLSASVGDRVTITCRASQGISNNLNWYQQKPGKAPKLLIYDASNLETGVPSRFSGSGSGTDFTLTISSLQPEDFATYYCQQSYSTPLTFGQGTKVEIK

SEQ ID NO: 498 - protein, 118 aa, Artificial Sequence
  Description of Artificial Sequence: Synthetic polypeptide
QVQLVQSGAEVKKPGASVKVSCKASGYTFTDYFLHWVRQAPGQGLEWMGWMNPTSGNTGYAQKFQGRVTMTRDTSTSTVYMELSSLRSEDTAVYYCAREGEGSGFDYWGQGTLVTVSS

SEQ ID NO: 499 - protein, 107 aa, Artificial Sequence
  Description of Artificial Sequence: Synthetic polypeptide
DIQMTQSPSSLSASVGDRVTITCRASQGINSWLAWYQQKPGKAPKLLIYDASNLETGVPSRFSGSGSGTDFTLTISSLQPEDFATYYCQQSYSTPLTFGGGTKVEIK

SEQ ID NO: 500 - protein, 120 aa, Artificial Sequence
  Description of Artificial Sequence: Synthetic polypeptide
QVQLVQSGAEVKKPGASVKVSCKASGYTFTSYYMHWVRQAPGQGLEWMAWMNPNSGNTGYAQKFQGRVTMTRDTSTSTVYMELSSLRSEDTAVYYCARDYDFWSGSLGYWGQGTLVTVSS

SEQ ID NO: 501 - protein, 107 aa, Artificial Sequence
  Description of Artificial Sequence: Synthetic polypeptide
DIQMTQSPSSLSASVGDRVTITCRASQGISNYLAWYQQKPGKAPKLLIYAASSLQSGVPSRFSGSGSGTDFTLTISSLQPEDFATYYCQQSYSTPWTFGQGTKVEIK

SEQ ID NO: 502 - protein, 125 aa, Artificial Sequence
  Description of Artificial Sequence: Synthetic polypeptide
QVQLVQSGAEVKKPGASVKVSCKASGYTFTSYYMHWVRQAPGQGLEWMGIINPSGGSTSYAQKFQGRVTMTRDTSTSTVYMELSSLRSEDTAVYYCARDTGYSYGRYYYYGMDVWGQGTLVTVSS

SEQ ID NO: 503 - protein, 107 aa, Artificial Sequence
  Description of Artificial Sequence: Synthetic polypeptide
DIQMTQSPSSLSASVGDRVTITCRASQSIGRWLAWYQQKPGKAPKLLIYDASNLQSGVPSRFSGSGSGTDFTLTISSLQPEDFATYYCQQSYSIPITFGQGTKVEIK

SEQ ID NO: 504 - protein, 121 aa, Artificial Sequence
  Description of Artificial Sequence: Synthetic polypeptide
QVQLVQSGAEVKKPGASVKVSCKASGYTLTDYYMHWVRQAPGQGLEWMGIINPSGGSTSYAQKFQGRVTMTRDTSTSTVYMELSSLRSEDTAVYYCAREEYSSSSGYFDYWGQGTLVTVSS

SEQ ID NO: 505 - protein, 107 aa, Artificial Sequence
  Description of Artificial Sequence: Synthetic polypeptide
DIQMTQSPSSLSASVGDRVTITCRASQGISSWLAWYQQKPGKAPKLLIYAASSLQSGVPSRFSGSGSGTDFTLTISSLQPEDFATYYCQQSYSTPLTFGQGTKVEIK

SEQ ID NO: 506 - protein, 120 aa, Artificial Sequence
  Description of Artificial Sequence: Synthetic polypeptide
QVQLVQSGAEVKKPGASVKVSCKASGYTFTSYGISWVRQAPGQGLEWMGWMHPKSGDTGLTQKFQGRVTMTRDTSTSTVYMELSSLRSEDTAVYYCARDTPYYYYGMDVWGQGTTVTVSS

SEQ ID NO: 507 - protein, 107 aa, Artificial Sequence
  Description of Artificial Sequence: Synthetic polypeptide
DIQMTQSPSSLSASVGDRVTITCRASQSISSWLAWYQQKPGKAPKLLIYAASSLQSGVPSRFSGSGSGTDFTLTISSLQPEDFATYYCQQSYSVPITFGQGTKVEIK

SEQ ID NO: 508 - protein, 14 aa, Artificial Sequence
  Description of Artificial Sequence: Synthetic peptide
CAKERFIDYGMDVW

SEQ ID NO: 509 - protein, 8 aa, Artificial Sequence
  Description of Artificial Sequence: Synthetic peptide
QQTYSGWT

SEQ ID NO: 510 - protein, 119 aa, Artificial Sequence
  Description of Artificial Sequence: Synthetic polypeptide
EVQLLESGGGLVQPGGSLRLSCAASGFTFSSYAMSWVRQAPGKGLEWVSAISGSGGSTYYADSVKGRFTISRDNSKNTLYLQMNSLRAEDTAVYYCAKERFIDYGMDVWGQGTTVTVSS

SEQ ID NO: 511 - protein, 106 aa, Artificial Sequence
  Description of Artificial Sequence: Synthetic polypeptide
DIQMTQSPSSLSASVGDRVTITCQASQDISNYLNWYQQKPGKAPKLLIYAASSLQSGVPSRFSGSGSGTDFTLTISSLQPEDFATYYCQQTYSGWTFGPGTKVDIK

SEQ ID NO: 512 - protein, 121 aa, Artificial Sequence
  Description of Artificial Sequence: Synthetic polypeptide
EVQLVESGGGLVKPGGSLRLSCAASGFTFGDYAMSWVRQAPGKGLEWVSYISGDIGYTNYAAPVKGRFTISRDDSKNTLYLQMNSLKTEDTAVYYCARDVAATGNWYFDLWGRGTLVTVSS

SEQ ID NO: 513 - protein, 123 aa, Artificial Sequence
  Description of Artificial Sequence: Synthetic polypeptide
EVQLLESGGGLVQPGGSLRLSCAASGFSFSSYTMNWVRQAPGKGLEWVSFITSSSRTIYYADSVKGRFTISRDNSKNTLYLQMNSLRAEDTAVYYCARDRRGDYGDSWYFDLWGRGTLVTVSS

SEQ ID NO: 514 - protein, 107 aa, Artificial Sequence
  Description of Artificial Sequence: Synthetic polypeptide
EIVMTQSPATLSVSPGERATLSCRASQSVRNYLAWYQQKPGQAPRLLIYGASTRATGIPARFSGSGSGTEFTLTISSLQSEDFAVYYCQQYGSSPLTFGGGTKVEIK

SEQ ID NO: 515 - protein, 121 aa, Artificial Sequence
  Description of Artificial Sequence: Synthetic polypeptide
QVQLVQSGAEVKKPGASVKVSCKASGYTFSKHFVHWVRQAPGQGLEWMGWMNPNSGNSGYAQKFQGRVTMTRDTSTSTVYMELSSLRSEDTAVYYCARGEGGYYYYGMDVWGQGTLVTVSS

SEQ ID NO: 516 - protein, 107 aa, Artificial Sequence
  Description of Artificial Sequence: Synthetic polypeptide
DIQMTQSPSSLSASVGDRVTITCRASQSISSWLAWYQQKPGKAPKLLIYAASTLQSGVPSRFSGSGSGTDFTLTISSLQPEDFATYYCQQSYSTPWTFGQGTKVEIK

SEQ ID NO: 517 - protein, 120 aa, Artificial Sequence
  Description of Artificial Sequence: Synthetic polypeptide
EVQLLESGGGLVQPGGSLRLSCAASGFTFGSYSMSWVRQAPGKGLEWVSAIGTGGGTYYADSVKGRFTISRDNSKNTLYLQMNSLRAEDTAVYYCAKGTPYYYYYGMDVWGQGTMVTVSS

SEQ ID NO: 518 - protein, 107 aa, Artificial Sequence
  Description of Artificial Sequence: Synthetic polypeptide
DIQMTQSPSSLSASVGDRVTITCRASQPLSNWLAWYQQKPGKAPKLLIYAASSLQSGVPSRFSGSGSGTDFTLTISSLQPEDFATYYCQQAISFPLTFGGGTKVEIK

SEQ ID NO: 519 - protein, 125 aa, Artificial Sequence
  Description of Artificial Sequence: Synthetic polypeptide
QVQLVQSGAEVKKPGASVKVSCKASGYTFTSYYMHWVRQAPGQGLEWMGWMNPNSGNTGYAQKFQGRVTMTRDTSTSTVYMELSSLRSEDTAVYYCARDLGYYDSSGYFGAFDIWGQGTTVTVSS

SEQ ID NO: 520 - protein, 107 aa, Artificial Sequence
  Description of Artificial Sequence: Synthetic polypeptide
DIQMTQSPSSLSASVGDRVTITCQSSEDISSSLNWYQQKPGKAPKLLIYAASSLQIGVPSRFSGSGSGTDFTLTISSLQPEDFATYYCQQTYSTPYTFGQGTKVEIK

SEQ ID NO: 521 - protein, 122 aa, Artificial Sequence
  Description of Artificial Sequence: Synthetic polypeptide
QVQLVQSGAEVKKPGASVKVSCKASGYTFTSYGISWVRQAPGQGLEWMGIINPRGGSTIFAQKFQGRVTMTRDTSTSTVYMELSSLRSEDTAVYYCARGTRSSGWYGWFDPWGQGTLVTVSS

SEQ ID NO: 522 - protein, 107 aa, Artificial Sequence
  Description of Artificial Sequence: Synthetic polypeptide
DIQMTQSPSSLSASVGDRVTITCRASQGIGNWLAWYQQKPGKAPKLLIYAASNLETGVPSRFSGSGSGTDFTLTISSLQPEDFATYYCQQIHSYPLTFGGGTKVEIK

SEQ ID NO: 523 - protein, 120 aa, Artificial Sequence
  Description of Artificial Sequence: Synthetic polypeptide
EVQLVESGGGLVKPGGSLRLSCAASGFIFQDSAIHWVRQAPGKGLEWVSAIGTGGGTYYAAPVKGRFTISRDDSKNTLYLQMNSLKTEDTAVYYCARSYCSGGSCSLGSWGQGTLVTVSS

SEQ ID NO: 524 - protein, 112 aa, Artificial Sequence
  Description of Artificial Sequence: Synthetic polypeptide
DIVMTQSPLSLPVTPGEPASISCRSSQSLLHSNGYNYLDWYLQKPGQSPQLLIYDASNLETGVPDRFSGSGSGTDFTLKISRVEAEDVGVYYCMQALQTPLTFGQGTKVEIK

SEQ ID NO: 525 - protein, 121 aa, Artificial Sequence
  Description of Artificial Sequence: Synthetic polypeptide
EVQLLESGGGLVQPGGSLRLSCAASGFTFDDYGMSWVRQAPGKGLEWVSYISSSSSYIYYADSVKGRFTISRDNSKNTLYLQMNSLRAEDTAVYYCAREIAAAGFYGMDVWGQGTTVTVSS

SEQ ID NO: 526 - protein, 23 aa, Artificial Sequence
  Description of Artificial Sequence: Synthetic peptide
CAREGLGYCTNGVCWNYYGMDVW

SEQ ID NO: 527 - protein, 9 aa, Artificial Sequence
  Description of Artificial Sequence: Synthetic peptide
QQSYSTPYT

SEQ ID NO: 528 - protein, 128 aa, Artificial Sequence
  Description of Artificial Sequence: Synthetic polypeptide
QVQLVQSGAEVKKPGASVKVSCKASGYTFTSYYMHWVRQAPGQGLEWMGWMNPNSGNTGYAQKFQGRVTMTRDTSTSTVYMELSSLRSEDTAVYYCAREGLGYCTNGVCWNYYGMDVWGQGTLVTVSS

SEQ ID NO: 529 - protein, 107 aa, Artificial Sequence
  Description of Artificial Sequence: Synthetic polypeptide
DIQMTQSPSSLSASVGDRVTITCRASQGISSWLAWYQQKPGKAPKLLIYGASSLQSGVPSRFSGSGSGTDFTLTISSLQPEDFATYYCQQSYSTPYTFGQGTKVEIK

SEQ ID NO: 530 - protein, 126 aa, Artificial Sequence
  Description of Artificial Sequence: Synthetic polypeptide
QVQLVQSGAEVKKPGSSVKVSCKASGGTLSRYGVSWVRQAPGQGLEWMGGIIPIFGTTNYAQKFQGRVTITADESTSTAYMELSSLRSEDTAVYYCARDRVYYDSSGYPTWYFDLWGRGTLVTVSS

SEQ ID NO: 531 - protein, 108 aa, Artificial Sequence
  Description of Artificial Sequence: Synthetic polypeptide
EIVMTQSPATLSVSPGERATLSCRASQSVSSSYLAWYQQKPGQAPRLLIYGASTRATGIPARFSGSGSGTEFTLTISSLQSEDFAVYYCQQYGSSPITFGQGTKVEIK

SEQ ID NO: 532 - protein, 121 aa, Artificial Sequence
  Description of Artificial Sequence: Synthetic polypeptide
EVQLLESGGGLVQPGGSLRLSCAASGFTFDDFAMHWVRQAPGKGLEWVSGISGNGDSRYYADSVKGRFTISRDNSKNTLYLQMNSLRAEDTAVYYCARDASYGGNYGMDVWGQGTTVTVSS

SEQ ID NO: 533 - protein, 107 aa, Artificial Sequence
  Description of Artificial Sequence: Synthetic polypeptide
DIQMTQSPSSLSASVGDRVTITCQASQDIRNYLNWYQQKPGKAPKLLIYKASTLESGVPSRFSGSGSGTDFTLTISSLQPEDFATYYCQQANSFPLTFGPGTKVDIK

SEQ ID NO: 534 - protein, 119 aa, Artificial Sequence
  Description of Artificial Sequence: Synthetic polypeptide
EVQLVESGGGLVKPGGSLRLSCAASGFTFSSYWMSWVRQAPGKGLEWVSAIGTGGGTYYAAPVKGRFTISRDDSKNTLYLQMNSLKTEDTAVYYCAREWLVPYYGMDVWGQGTTVTVSS

SEQ ID NO: 535 - protein, 107 aa, Artificial Sequence
  Description of Artificial Sequence: Synthetic polypeptide
DIQMTQSPSSLSASVGDRVTITCRASQSISRWLAWYQQKPGKAPKLLIYGASNLQSGVPSRFSGSGSGTDFTLTISSLQPEDFATYYCQQSYSTPWTFGQGTKVEIK

SEQ ID NO: 536 - protein, 120 aa, Artificial Sequence
  Description of Artificial Sequence: Synthetic polypeptide
EVQLLESGGGLVQPGGSLRLSCAASGFSVSSNYMSWVRQAPGKGLEWVAGISYDGSSKPYADSVKGRFTISRDNSKNTLYLQMNSLRAEDTAVYYCARSRGIAARPLQHWGQGTLVTVSS

SEQ ID NO: 537 - protein, 113 aa, Artificial Sequence
  Description of Artificial Sequence: Synthetic polypeptide
DIVMTQSPDSLAVSLGERATINCKSSQSVLYSSNNKNYLAWYQQKPGQPPKLLIYWASTRQSGVPDRFSGSGSGTDFTLTISSLQAEDVAVYYCHQYYGHPPTFGGGTKVEIK

SEQ ID NO: 538 - protein, 113 aa, Artificial Sequence
  Description of Artificial Sequence: Synthetic polypeptide
DIVMTQSPDSLAVSLGERATINCKSSQSVLYSSNNKNYLAWYQQKPGQPPKLLIYQASTRQSGVPDRFSGSGSGTDFTLTISSLQAEDVAVYYCHQYYGHPPTFGGGTKVEIK

SEQ ID NO: 539 - protein, 121 aa, Artificial Sequence
  Description of Artificial Sequence: Synthetic polypeptide
EVQLLESGGGLVQPGGSLRLSCAASGFSFSDYGMHWVRQAPGKGLEWVSAISGSGGSTYYADSVKGRFTISRDNSKNTLYLQMNSLRAEDTAVYYCARDGGWQPAAILDYWGQGTLVTVSS

SEQ ID NO: 540 - protein, 107 aa, Artificial Sequence
  Description of Artificial Sequence: Synthetic polypeptide
DIQMTQSPSSLSASVGDRVTITCRASQGISNNLNWYQQKPGKAPKLLIYDASNLETGVPSRFSGSGSGTDFTLTISSLQPEDFATYYCQQSYSTPLTFGGGTKVEIK

SEQ ID NO: 541 - protein, 120 aa, Artificial Sequence
  Description of Artificial Sequence: Synthetic polypeptide
EVQLLESGGGLVQPGGSLRLSCAASGFTFSDHGMHWVRQAPGKGLEWVSVIYGGESTYYADSVKGRFTISRDNSKNTLYLQMNSLRAEDTAVYYCARDPAVAGGGIFDYWGQGTLVTVSS

SEQ ID NO: 542 - protein, 107 aa, Artificial Sequence
  Description of Artificial Sequence: Synthetic polypeptide
DIQMTQSPSSLSASVGDRVTITCRASQGISNYLAWYQQKPGKAPKLLIYDASNLETGVPSRFSGSGSGTDFTLTISSLQPEDFATYYCQQSYSTCYTFGQGTKLEIK

SEQ ID NO: 543 - protein, 122 aa, Artificial Sequence
  Description of Artificial Sequence: Synthetic polypeptide
QVQLVQSGAEVKKPGASVKVSCKASGDTFTGYYIHWVRQAPGQGLEWMGWINPNSGGTNYAQKFQGRVTMTRDTSTSTVYMELSSLRSEDTAVYYCARSGLWLGSYYGMDVWGQGTLVTVSS

SEQ ID NO: 544 - protein, 107 aa, Artificial Sequence
  Description of Artificial Sequence: Synthetic polypeptide
DIQMTQSPSSLSASVGDRVTITCRASQTISIWLAWYQQKPGKAPKLLIYDASTLQSGVPSRFSGSGSGTDFTLTISSLQPEDFATYYCQQYSSYPLTFGQGTKVEIK

SEQ ID NO: 545 - protein, 119 aa, Artificial Sequence
  Description of Artificial Sequence: Synthetic polypeptide
QVQLVQSGAEVKKPGASVKVSCKASGYTFTSYDINWVRQAPGQGLEWMGWINPNSGTTGYAQKFQGRVTMTRDTSTSTVYMELSSLRSEDTAVYYCARSPYYYYGMDVWGQGTTVTVSS

SEQ ID NO: 546 - protein, 106 aa, Artificial Sequence
  Description of Artificial Sequence: Synthetic polypeptide
DIQMTQSPSSLSASVGDRVTITCRASHFISRWVAWYQQKPGKAPKLLIYAASTLQSGVPSRFSGSGSGTDFTLTISSLQPEDFATYYCQQSYSGISFGPGTKVDIK

SEQ ID NO: 547 - protein, 119 aa, Artificial Sequence
  Description of Artificial Sequence: Synthetic polypeptide
EVQLLESGGGLVQPGGSLRLSCAASGFTFNNYGMNWVRQAPGKGLEWVSRINSDGSSTSYADSVKGRFTISRDNSKNTLYLQMNSLRAEDTAVYYCARGAYYYYYMDVWGQGTLVTVSS

SEQ ID NO: 548 - protein, 107 aa, Artificial Sequence
  Description of Artificial Sequence: Synthetic polypeptide
EIVMTQSPATLSVSPGERATLSCRASQSVSGSYLAWYQQKPGQAPRLLIYATSSRASGIPARFSGSGSGTEFTLTISSLQSEDFAVYYCQQYYSGLTFGQGTKVEIK

SEQ ID NO: 549 - protein, 122 aa, Artificial Sequence
  Description of Artificial Sequence: Synthetic polypeptide
EVQLLESGGGLVQPGGSLRLSCAASGFTFSNSDMNWVRQAPGKGLEWVAHIWNDGSQKYYADSVKGRFTISRDNSKNTLYLQMNSLRAEDTAVYYCARDRTDPGYSSAMDVWGQGTTVTVSS

SEQ ID NO: 550 - protein, 107 aa, Artificial Sequence
  Description of Artificial Sequence: Synthetic polypeptide
DIQMTQSPSSLSASVGDRVTITCRASQDIRNYLGWYQQKPGKAPKLLIYDASSLETGVPSRFSGSGSGTDFTLTISSLQPEDFATYYCQQATSLPLTFGGGTKVEIK

SEQ ID NO: 551 - protein, 120 aa, Artificial Sequence
  Description of Artificial Sequence: Synthetic polypeptide
QVQLVQSGAEVKKPGASVKVSCKASGYTFTSYDINWVRQAPGQGLEWMGWMNPNSGNTGYAQKFQGRVTMTRDTSTSTVYMELSSLRSEDTAVYYCAKDSDYSNLLWDYWGQGTLVTVSS

SEQ ID NO: 552 - protein, 107 aa, Artificial Sequence
  Description of Artificial Sequence: Synthetic polypeptide
DIQMTQSPSSLSASVGDRVTITCRASQDITNDLGWYQQKPGKAPKLLIYQASSLESGVPSRFSGSGSGTDFTLTISSLQPEDFATYYCQQSYTIPLTFGQGTKVEIK

SEQ ID NO: 553 - protein, 19 aa, Artificial Sequence
  Description of Artificial Sequence: Synthetic peptide
CARDGAWFGEEYYYGMDVW

SEQ ID NO: 554 - protein, 11 aa, Artificial Sequence
  Description of Artificial Sequence: Synthetic peptide
RASQGISNWLA

SEQ ID NO: 555 - protein, 10 aa, Artificial Sequence
  Description of Artificial Sequence: Synthetic peptide
QQYYSFPLYT

SEQ ID NO: 556 - protein, 124 aa, Artificial Sequence
  Description of Artificial Sequence: Synthetic polypeptide
QVQLVQSGAEVKKPGASVKVSCKASGYTFTGHYMHWVRQAPGQGLEWMGIINPSGGSTSYAQKFQGRVTMTRDTSTSTVYMELSSLRSEDTAVYYCARDGAWFGEEYYYGMDVWGQGTTVTVSS

SEQ ID NO: 557 - protein, 108 aa, Artificial Sequence
  Description of Artificial Sequence: Synthetic polypeptide
DIQMTQSPSSLSASVGDRVTITCRASQGISNWLAWYQQKPGKAPKLLIYDASNLETGVPSRFSGSGSGTDFTLTISSLQPEDFATYYCQQYYSFPLYTFGQGTKVEIK

SEQ ID NO: 558 - protein, 13 aa, Artificial Sequence
  Description of Artificial Sequence: Synthetic peptide
GMIYPRDGSTSYA

SEQ ID NO: 559 - protein, 13 aa, Artificial Sequence
  Description of Artificial Sequence: Synthetic peptide
CAMTGWGYGMDVW

SEQ ID NO: 560 - protein, 11 aa, Artificial Sequence
  Description of Artificial Sequence: Synthetic peptide
RASQGINNYLA

SEQ ID NO: 561 - protein, 9 aa, Artificial Sequence
  Description of Artificial Sequence: Synthetic peptide
QQSYSAPPT

SEQ ID NO: 562 - protein, 118 aa, Artificial Sequence
  Description of Artificial Sequence: Synthetic polypeptide
QVQLVQSGAEVKKPGASVKVSCKASGYTFTGYYMHWVRQAPGQGLEWMGMIYPRDGSTSYAQKFQGRVTMTRDTSTSTVYMELSSLRSEDTAVYYCAMTGWGYGMDVWGKGTTVTVSS

SEQ ID NO: 563 - protein, 107 aa, Artificial Sequence
  Description of Artificial Sequence: Synthetic polypeptide
DIQMTQSPSSLSASVGDRVTITCRASQGINNYLAWYQQKPGKAPKLLIYDASTLQSGVPSRFSGSGSGTDFTLTISSLQPEDFATYYCQQSYSAPPTFGQGTKLEIK

SEQ ID NO: 564 - protein, 121 aa, Artificial Sequence
  Description of Artificial Sequence: Synthetic polypeptide
EVQLLESGGGLVQPGGSLRLSCAASGFTFGDYAMSWVRQAPGKGLEWVAVVSYDGTNKYYADSVKGRFTISRDNSKNTLYLQMNSLRAEDTAVYYCAKDICSSTSCYFDLWGRGTLVTVSS

SEQ ID NO: 565 - protein, 107 aa, Artificial Sequence
  Description of Artificial Sequence: Synthetic polypeptide
DIQMTQSPSSLSASVGDRVTITCRASQNINNYVNWYQQKPGKAPKLLIYDASNLETGVPSRFSGSGSGTDFTLTISSLQPEDFATYYCQQANSFPPTFGQGTRLEIK

SEQ ID NO: 566 - protein, 122 aa, Artificial Sequence
  Description of Artificial Sequence: Synthetic polypeptide
QVQLVQSGAEVKKPGASVKVSCKASGYTFTSYYMHWVRQAPGQGLEWMGIIDPSGGSTSYAQKFQGRVTMTRDTSTSTVYMELSSLRSEDTAVYYCAREEWSSGGVGYFDYWGQGTLVTVSS

SEQ ID NO: 567 - protein, 107 aa, Artificial Sequence
  Description of Artificial Sequence: Synthetic polypeptide
DIQMTQSPSSLSASVGDRVTITCRASQGISSYLAWYQQKPGKAPKLLIYATSSLQTGVPSRFSGSGSGTDFTLTISSLQPEDFATYYCQQTYSIPITFGQGTRLEIK

SEQ ID NO: 568 - protein, 9 aa, Artificial Sequence
  Description of Artificial Sequence: Synthetic peptide
YPFTDYYMH

SEQ ID NO: 569 - protein, 13 aa, Artificial Sequence
  Description of Artificial Sequence: Synthetic peptide
GWIKPNSGDTEYA

SEQ ID NO: 570 - protein, 20 aa, Artificial Sequence
  Description of Artificial Sequence: Synthetic peptide
CARDRFVGKPDYYYYGMDVW

SEQ ID NO: 571 - protein, 11 aa, Artificial Sequence
  Description of Artificial Sequence: Synthetic peptide
RASQSISVWLA

SEQ ID NO: 572 - protein, 9 aa, Artificial Sequence
  Description of Artificial Sequence: Synthetic peptide
QQSYDTPYT

SEQ ID NO: 573 - protein, 125 aa, Artificial Sequence
  Description of Artificial Sequence: Synthetic polypeptide
QVQLVQSGAEVKKPGASVKVSCKASGYPFTDYYMHWVRQAPGQGLEWMGWIKPNSGDTEYAQKFQGRVTMTRDTSTSTVYMELSSLRSEDTAVYYCARDRFVGKPDYYYYGMDVWGQGTMVTVSS

SEQ ID NO: 574 - protein, 107 aa, Artificial Sequence
  Description of Artificial Sequence: Synthetic polypeptide
DIQMTQSPSSLSASVGDRVTITCRASQSISVWLAWYQQKPGKAPKLLIYAASSLQSGVPSRFSGSGSGTDFTLTISSLQPEDFATYYCQQSYDTPYTFGQGTKLEIK

SEQ ID NO: 575 - protein, 124 aa, Artificial Sequence
  Description of Artificial Sequence: Synthetic polypeptide
QVQLVQSGAEVKKPGASVKVSCKASGYTFTSYYMHWVRQAPGQGLEWMGIINPSGGSTSYAQKFQGRVTMTRDTSTSTVYMELSSLRSEDTAVYYCARDSVAGTGGRYYGMDVWGQGTLVTVSS

SEQ ID NO: 576 - protein, 107 aa, Artificial Sequence
  Description of Artificial Sequence: Synthetic polypeptide
DIQMTQSPSSLSASVGDRVTITCRASQGISNYFAWYQQKPGKAPKLLIYAASSLQGGVPSRFSGSGSGTDFTLTISSLQPEDFATYYCQQSYSLPYTFGQGTKLEIK

SEQ ID NO: 577 - protein, 13 aa, Artificial Sequence
  Description of Artificial Sequence: Synthetic peptide
GVINPIGGTTTYA

SEQ ID NO: 578 - protein, 16 aa, Artificial Sequence
  Description of Artificial Sequence: Synthetic peptide
CASGAPSYYYYGMDVW

SEQ ID NO: 579 - protein, 5 aa, Artificial Sequence
  Description of Artificial Sequence: Synthetic peptide
SYLAT

SEQ ID NO: 580 - protein, 121 aa, Artificial Sequence
  Description of Artificial Sequence: Synthetic polypeptide
QVQLVQSGAEVKKPGASVKVSCKASGYTFTSYYMHWVRQAPGQGLEWMGVINPIGGTTTYAQKFQGRVTMTRDTSTSTVYMELSSLRSEDTAVYYCASGAPSYYYYGMDVWGQGTLVTVSS

SEQ ID NO: 581 - protein, 107 aa, Artificial Sequence
  Description of Artificial Sequence: Synthetic polypeptide
DIQMTQSPSSLSASVGDRVTITCRASQSISSYLNWYQQKPGKAPKLLIYGTSYLATGVPSRFSGSGSGTDFTLTISSLQPEDFATYYCQQSYSTPLTFGQGTKVEIK

SEQ ID NO: 582 - protein, 9 aa, Artificial Sequence
  Description of Artificial Sequence: Synthetic peptide
YTFTSNYVH

SEQ ID NO: 583 - protein, 13 aa, Artificial Sequence
  Description of Artificial Sequence: Synthetic peptide
GRINPHSGDTSYA

SEQ ID NO: 584 - protein, 16 aa, Artificial Sequence
  Description of Artificial Sequence: Synthetic peptide
CARAGQLWSDWYFDLW

SEQ ID NO: 585 - protein, 5 aa, Artificial Sequence
  Description of Artificial Sequence: Synthetic peptide
TALRT

SEQ ID NO: 586 - protein, 9 aa, Artificial Sequence
  Description of Artificial Sequence: Synthetic peptide
QQSYSHPLT

SEQ ID NO: 587 - protein, 121 aa, Artificial Sequence
  Description of Artificial Sequence: Synthetic polypeptide
QVQLVQSGAEVKKPGASVKVSCKASGYTFTSNYVHWVRQAPGQGLEWMGRINPHSGDTSYAQKFQGRVTMTRDTSTSTVYMELSSLRSEDTAVYYCARAGQLWSDWYFDLWGRGTLVTVSS

SEQ ID NO: 588 - protein, 107 aa, Artificial Sequence
  Description of Artificial Sequence: Synthetic polypeptide
DIQMTQSPSSLSASVGDRVTITCQASQDIRNYLNWYQQKPGKAPKLLIYAATALRTGVPSRFSGSGSGTDFTLTISSLQPEDFATYYCQQSYSHPLTFGQGTKVEIK

SEQ ID NO: 589 - protein, 118 aa, Artificial Sequence
  Description of Artificial Sequence: Synthetic polypeptide
QVQLVQSGAEVKKPGASVKVSCKASGYTFTGYYMHWVRQAPGQGLEWMGIINPSGGNTKYAQKFQGRVTMTRDTSTSTVYMELSSLRSEDTAVYYCTTADYYYYMDVWGKGTTVTVSS

SEQ ID NO: 590 - protein, 106 aa, Artificial Sequence
  Description of Artificial Sequence: Synthetic polypeptide
DIQMTQSPSSLSASVGDRVTITCRASQGISNYLAWYQQKPGKAPKLLIYAASSLQSGVPSRFSGSGSGTDFTLTISSLQPEDFATYYCQQYYSNADFGQGTKVEIK

SEQ ID NO: 591 - protein, 119 aa, Artificial Sequence
  Description of Artificial Sequence: Synthetic polypeptide
EVQLLESGGGLVQPGGSLRLSCAASGFTFSDFWMHWVRQAPGKGLEWISYISGDSGYTNYADSVKGRFTISRDNSKNTLYLQMNSLRAEDTAVYYCARDRPYYYYMDVWGKGTTVTVSS

SEQ ID NO: 592 - protein, 107 aa, Artificial Sequence
  Description of Artificial Sequence: Synthetic polypeptide
DIQMTQSPSSLSASVGDRVTITCRASQSVSRSLAWYQQKPGKAPKLLIYAASSLQSGVPSRFSGSGSGTDFTLTISSLQPEDFATYYCQQYKSYPVTFGQGTKVEIK

SEQ ID NO: 593 - protein, 122 aa, Artificial Sequence
  Description of Artificial Sequence: Synthetic polypeptide
EVQLLESGGGLVQPGGSLRLSCAASGFTFDDYTMHWVRQAPGKGLEWVSDISGSGGSTYYADSVKGRFTISRDNSKNTLYLQMNSLRAEDTAVYYCAKDVVVAGTPLHFDYWGQGTLVTVSS

SEQ ID NO: 594 - protein, 107 aa, Artificial Sequence
  Description of Artificial Sequence: Synthetic polypeptide
DIQMTQSPSSLSASVGDRVTITCQASQDISNYLNWYQQKPGKAPKLLIYAASYLQSGVPSRFSGSGSGTDFTLTISSLQPEDFATYYCQQAHNYPITFGQGTRLEIK

SEQ ID NO: 595 - protein, 119 aa, Artificial Sequence
  Description of Artificial Sequence: Synthetic polypeptide
EVQLLESGGGLVQPGGSLRLSCAASEFTFSNAWMSWVRQAPGKGLEWVASISSTSAYIDYADSVKGRFTISRDNSKNTLYLQMNSLRAEDTAVYYCAREVVGATTFDYWGQGTLVTVSS

SEQ ID NO: 596 - protein, 107 aa, Artificial Sequence
  Description of Artificial Sequence: Synthetic polypeptide
DIQMTQSPSSLSASVGDRVTITCRASQSISTWLAWYQQKPGKAPKLLIYAASSLQSGVPSRFSGSGSGTDFTLTISSLQPEDFATYYCQQANAFPPTFGQGTRLEIK

SEQ ID NO: 597 - protein, 117 aa, Artificial Sequence
  Description of Artificial Sequence: Synthetic polypeptide
QVQLVQSGAEVKKPGSSVKVSCKASGGTFSSYAISWVRQAPGQGLEWMGWMEPHTGNTRYAQKFQGRVTITADESTSTAYMELSSLRSEDTAVYYCAKGGFSWFDPWGQGTLVTVSS

SEQ ID NO: 598 - protein, 113 aa, Artificial Sequence
  Description of Artificial Sequence: Synthetic polypeptide
DIVMTQSPDSLAVSLGERATINCKSSQSVLYSSNNKNYLAWYQQKPGQPPKLLIYWASTRESGVPDRFSGSGSGTDFTLTISSLQAEDVAVYYCQQYYSTPPTFGQGTRLEIK

SEQ ID NO: 599 - protein, 120 aa, Artificial Sequence
  Description of Artificial Sequence: Synthetic polypeptide
EVQLLESGGGLVKPGGSLRLSCAASGFTFDDYAMHWVRQAPGKGLEWVASITSSSAFIDYAASVKGRFTISRDDSKNTLYLQMNSLKTEDTAVYYCARERVDWNSYFDLWGRGTLVTVSS

SEQ ID NO: 600 - protein, 108 aa, Artificial Sequence
  Description of Artificial Sequence: Synthetic polypeptide
EIVMTQSPATLSVSPGERATLSCRASQGISNSYLAWYQQKPGQAPRLLIYGASTRATGIPARFSGSGSGTEFTLTISSLQSEDFAVYYCQQYYTYPPTFGPGTKVDIK

SEQ ID NO: 601 - protein, 16 aa, Artificial Sequence
  Description of Artificial Sequence: Synthetic peptide
CAKDLGVVVPAALDYW

SEQ ID NO: 602 - protein, 11 aa, Artificial Sequence
  Description of Artificial Sequence: Synthetic peptide
QASQDISNHLN

SEQ ID NO: 603 - protein, 5 aa, Artificial Sequence
  Description of Artificial Sequence: Synthetic peptide
SNLEA

SEQ ID NO: 604 - protein, 121 aa, Artificial Sequence
  Description of Artificial Sequence: Synthetic polypeptide
EVQLLESGGGLVQPGGSLRLSCAASGFTFDDYAMHWVRQAPGKGLEWVSAISGSGGSTYYADSVKGRFTISRDNSKNTLYLQMNSLRAEDTAVYYCAKDLGVVVPAALDYWGQGTTVTVSS

SEQ ID NO: 605 - protein, 107 aa, Artificial Sequence
  Description of Artificial Sequence: Synthetic polypeptide
DIQMTQSPSSLSASVGDRVTITCQASQDISNHLNWYQQKPGKAPKLLIYDASNLEAGVPSRFSGSGSGTDFTLTISSLQPEDFATYYCQQSYSTPLTFGGGTKVEIK

SEQ ID NO: 606 - protein, 119 aa, Artificial Sequence
  Description of Artificial Sequence: Synthetic polypeptide
EVQLLESGGGLVKPGGSLRLSCAASGFAFSSHWMHWVRQAPGKGLEWVAGTSGSGESRDYADFVKGRFTISRDDSKNTLYLQMNSLKTEDTAVYYCARETYYYYYMDVWGKGTTVTVSS

SEQ ID NO: 607 - protein, 107 aa, Artificial Sequence
  Description of Artificial Sequence: Synthetic polypeptide
DIQMTQSPSSLSASVGDRVTITCRASQGISNYLAWYQQKPGKAPKLLIYDAANLEGGVPSRFSGSGSGTDFTLTISSLQPEDFATYYCQQSDIFPPTFGQGTKVEIK

SEQ ID NO: 608 - protein, 119 aa, Artificial Sequence
  Description of Artificial Sequence: Synthetic polypeptide
QVQLVQSGAEVKKPGASVKVSCKASGYTFTRHWIHWVRQAPGQGLEWMGWINVKTGGAGYAQKFQGRVTMTRDTSTSTVYMELSSLRSEDTAVYYCARESSGWYGTDVWGQGTTVTVSS

SEQ ID NO: 609 - protein, 107 aa, Artificial Sequence
  Description of Artificial Sequence: Synthetic polypeptide
DIQMTQSPSSLSASVGDRATITCRASQSISNYLAWYQQKPGKAPKLLIYAASSLQSGVPSRFSGSGSGTDFTLTISSLQPEDFATYYCQQSNSFPLTFGGGTKVEIK

SEQ ID NO: 610 - protein, 120 aa, Artificial Sequence
  Description of Artificial Sequence: Synthetic polypeptide
EVQLLESGGGLVQPGGSLRLSCAASGFTFSSYWMHWVRQAPGKGLEWVAAISYDGKYKDYEDSVKGRFTISRDNSKNTLYLQMNSLRAEDTAVYYCARENKQWLASFDYWGQGTLVTVSS

SEQ ID NO: 611 - protein, 106 aa, Artificial Sequence
  Description of Artificial Sequence: Synthetic polypeptide
DIQMTQSPSSLSASVGDRVTITCQASQDISNFVNWYQQKPGKAPKLLIYAANLRSGVPSRFSGSGSGTDFTLTISSLQPEDFATYYCQQANSFPVTFGPGTKVDIK

SEQ ID NO: 612 - protein, 9 aa, Artificial Sequence
  Description of Artificial Sequence: Synthetic peptide
GTFSSSAIS

SEQ ID NO: 613 - protein, 13 aa, Artificial Sequence
  Description of Artificial Sequence: Synthetic peptide
GWISAYNGYTNYA

SEQ ID NO: 614 - protein, 16 aa, Artificial Sequence
  Description of Artificial Sequence: Synthetic peptide
CASRVHSGGSYPDDYW

SEQ ID NO: 615 - protein, 11 aa, Artificial Sequence
  Description of Artificial Sequence: Synthetic peptide
QASEHIYNYLN

SEQ ID NO: 616 - protein, 9 aa, Artificial Sequence
  Description of Artificial Sequence: Synthetic peptide
QQTDSIPIT

SEQ ID NO: 617 - protein, 121 aa, Artificial Sequence
  Description of Artificial Sequence: Synthetic polypeptide
QVQLVQSGAEVKKPGASVKVSCKASGGTFSSSAISWVRQAPGQGLEWMGWISAYNGYTNYAQKFQGRVTMTRDTSTSTVYMELSSLRSEDTAVYYCASRVHSGGSYPDDYWGQGTLVTVSS

SEQ ID NO: 618 - protein, 107 aa, Artificial Sequence
  Description of Artificial Sequence: Synthetic polypeptide
DIQMTQSPSSLSASVGDRVTITCQASEHIYNYLNWYQQKPGKAPKLLIYAASSLQSGVPSRFSGSGSGTDFTLTISSLQPEDFATYYCQQTDSIPITFGQGTKVEIK

SEQ ID NO: 619 - protein, 10 aa, Artificial Sequence
  Description of Artificial Sequence: Synthetic peptide
GGGGSGGGGS

SEQ ID NO: 620 - protein, 588 aa, Artificial Sequence
  Description of Artificial Sequence: Synthetic polypeptide
EVQLLESGGGLVQPGGSLRLSCAASGFTFNNYAFHWVRQAPGKGLEWVSRINSYGTSTTYADSVKGRFTISRDNSKNTLYLQMNSLRAEDTAVYYCAREGPVAGYWYFDLWGQGTLVTVSSASTKGPSVFPLAPSSKSTSGGTAALGCLVKDYFPEPVTVSWNSGALTSGVHTFPAVLQSSGLYSLSSVVTVPSSSLGTQTYICNVNHKPSNTKVDKKVEPKSCDKTHTCPPCPAPEAAGAPSVFLFPPKPKDTLMISRTPEVTCVVVDVSHEDPEVKFNWYVDGVEVHNAKTKPREEQYNSTYRVVSVLTVLHQDWLNGKEYKCKVSNKALPAPIEKTISKAKGQPREPQVYTLPPSREEMTKNQVSLTCLVKGFYPSDIAVEWESNGQPENNYKTTPPVLDSDGSFFLYSKLTVDKSRWQQGNVFSCSVMHEALHNHYTQKSLSLSPGGGGGSAPTSSSTKKTQLQLEHLLLDLQMILNGINNYKNPKLTRMLTFKFYMPKKATELKHLQCLEEELKPLEEALNLAPSKNFHLRPRDLISDINVIVLELKGSETTFMCEYADETATIVEFINRWITFSQSIISTLT

SEQ ID NO: 621 - protein, 215 aa, Artificial Sequence
  Description of Artificial Sequence: Synthetic polypeptide
DIQMTQSPSSLSASVGDRVTITCRASQIIGTNLAWYQQKPGKAPKLLIYGASSLQSGVPSRFSGSGSGTDFTLTISSLQPEDFATYYCQQSYRLPFTFGQGTKVEIKRRTVAAPSVFIFPPSDEQLKSGTASVVCLLNNFYPREAKVQWKVDNALQSGNSQESVTEQDSKDSTYSLSSTLTLSKADYEKHKVYACEVTHQGLSSPVTKSFNRGEC

SEQ ID NO: 622 - protein, 586 aa, Artificial Sequence
  Description of Artificial Sequence: Synthetic polypeptide
EVQLLESGGGLVQPGGSLRLSCAASGFTFSDFWMHWVRQAPGKGLEWISYISGDSGYTNYADSVKGRFTISRDNSKNTLYLQMNSLRAEDTAVYYCARDRPYYYYMDVWGKGTTVTVSSASTKGPSVFPLAPSSKSTSGGTAALGCLVKDYFPEPVTVSWNSGALTSGVHTFPAVLQSSGLYSLSSVVTVPSSSLGTQTYICNVNHKPSNTKVDKKVEPKSCDKTHTCPPCPAPEAAGAPSVFLFPPKPKDTLMISRTPEVTCVVVDVSHEDPEVKFNWYVDGVEVHNAKTKPREEQYNSTYRVVSVLTVLHQDWLNGKEYKCKVSNKALPAPIEKTISKAKGQPREPQVYTLPPSREEMTKNQVSLTCLVKGFYPSDIAVEWESNGQPENNYKTTPPVLDSDGSFFLYSKLTVDKSRWQQGNVFSCSVMHEALHNHYTQKSLSLSPGGGGGSAPTSSSTKKTQLQLEHLLLDLQMILNGINNYKNPKLTRMLTFKFYMPKKATELKHLQCLEEELKPLEEALNLAPSKNFHLRPRDLISDINVIVLELKGSETTFMCEYADETATIVEFINRWITFSQSIISTLT

SEQ ID NO: 623 - protein, 214 aa, Artificial Sequence
  Description of Artificial Sequence: Synthetic polypeptide
DIQMTQSPSSLSASVGDRVTITCRASQSVSRSLAWYQQKPGKAPKLLIYAASSLQSGVPSRFSGSGSGTDFTLTISSLQPEDFATYYCQQYKSYPVTFGQGTKVEIKRTVAAPSVFIFPPSDEQLKSGTASVVCLLNNFYPREAKVQWKVDNALQSGNSQESVTEQDSKDSTYSLSSTLTLSKADYEKHKVYACEVTHQGLSSPVTKSFNRGEC

SEQ ID NO: 624 - protein, 587 aa, Artificial Sequence
  Description of Artificial Sequence: Synthetic polypeptide
EVQLLESGGGLVKPGGSLRLSCAASGFTFDDYAMHWVRQAPGKGLEWVASITSSSAFIDYAASVKGRFTISRDDSKNTLYLQMNSLKTEDTAVYYCARERVDWNSYFDLWGRGTLVTVSSASTKGPSVFPLAPSSKSTSGGTAALGCLVKDYFPEPVTVSWNSGALTSGVHTFPAVLQSSGLYSLSSVVTVPSSSLGTQTYICNVNHKPSNTKVDKKVEPKSCDKTHTCPPCPAPEAAGAPSVFLFPPKPKDTLMISRTPEVTCVVVDVSHEDPEVKFNWYVDGVEVHNAKTKPREEQYNSTYRVVSVLTVLHQDWLNGKEYKCKVSNKALPAPIEKTISKAKGQPREPQVYTLPPSREEMTKNQVSLTCLVKGFYPSDIAVEWESNGQPENNYKTTPPVLDSDGSFFLYSKLTVDKSRWQQGNVFSCSVMHEALHNHYTQKSLSLSPGGGGGSAPTSSSTKKTQLQLEHLLLDLQMILNGINNYKNPKLTRMLTFKFYMPKKATELKHLQCLEEELKPLEEALNLAPSKNFHLRPRDLISDINVIVLELKGSETTFMCEYADETATIVEFINRWITFSQSIISTLT

SEQ ID NO: 625 - protein, 215 aa, Artificial Sequence
  Description of Artificial Sequence: Synthetic polypeptide
EIVMTQSPATLSVSPGERATLSCRASQGISNSYLAWYQQKPGQAPRLLIYGASTRATGIPARFSGSGSGTEFTLTISSLQSEDFAVYYCQQYYTYPPTFGPGTKVDIKRTVAAPSVFIFPPSDEQLKSGTASVVCLLNNFYPREAKVQWKVDNALQSGNSQESVTEQDSKDSTYSLSSTLTLSKADYEKHKVYACEVTHQGLSSPVTKSFNRGEC

SEQ ID NO: 626 - protein, 107 aa, Artificial Sequence
  Description of Artificial Sequence: Synthetic polypeptide
EIVMTQSPATLSVSPGERATLSCRTSQSVSSDLAWYQQKPGQAPRLLIYGPSTRATGIPARFSGSGSGTEFTLTISSLQSEDFAVYYCQQYKTWPQTFGQGTKVEIK

SEQ ID NO: 627 - protein, 7 aa, Artificial Sequence
  Description of Artificial Sequence: Synthetic peptide
DASTGAT

SEQ ID NO: 628 - protein, 9 aa, Artificial Sequence
  Description of Artificial Sequence: Synthetic peptide
YSFTTYYMH

SEQ ID NO: 629 - protein, 14 aa, Artificial Sequence
  Description of Artificial Sequence: Synthetic peptide
VSRINSYGTSTTYA

SEQ ID NO: 630 - protein, 9 aa, Artificial Sequence
  Description of Artificial Sequence: Synthetic peptide
IYGASSLQS

SEQ ID NO: 631 - protein, 8 aa, Artificial Sequence
  Description of Artificial Sequence: Synthetic peptide
YGASSLQS

SEQ ID NO: 632 - protein, 9 aa, Artificial Sequence
  Description of Artificial Sequence: Synthetic peptide
QQSYRLPFT

SEQ ID NO: 633 - protein, 5 aa, Artificial Sequence
  Description of Artificial Sequence: Synthetic peptide
NYAFH

SEQ ID NO: 634 - protein, 17 aa, Artificial Sequence
  Description of Artificial Sequence: Synthetic peptide
RINSYGTSTTYADSVKG

SEQ ID NO: 635 - protein, 12 aa, Artificial Sequence
  Description of Artificial Sequence: Synthetic peptide
EGPVAGYWYFDL

SEQ ID NO: 636 - protein, 6 aa, Artificial Sequence
  Description of Artificial Sequence: Synthetic peptide
QIIGTN

SEQ ID NO: 637 - protein, 8 aa, Artificial Sequence
  Description of Artificial Sequence: Synthetic peptide
GFTFNNYA

SEQ ID NO: 638 - protein, 8 aa, Artificial Sequence
  Description of Artificial Sequence: Synthetic peptide
INSYGTST

SEQ ID NO: 639 - protein, 14 aa, Artificial Sequence
  Description of Artificial Sequence: Synthetic peptide
AREGPVAGYWYFDL

SEQ ID NO: 640 - protein, 7 aa, Artificial Sequence
  Description of Artificial Sequence: Synthetic peptide
GFTFNNY

SEQ ID NO: 641 - protein, 6 aa, Artificial Sequence
  Description of Artificial Sequence: Synthetic peptide
NSYGTS

SEQ ID NO: 642 - protein, 11 aa, Artificial Sequence [sequence omitted]

SEQ ID NO: 643 - protein, 5 aa, Artificial Sequence
  Description of Artificial Sequence: Synthetic peptide
DFWMH

SEQ ID NO: 644 - protein, 17 aa, Artificial Sequence
  Description of Artificial Sequence: Synthetic peptide
YISGDSGYTNYADSVKG

SEQ ID NO: 645 - protein, 10 aa, Artificial Sequence
  Description of Artificial Sequence: Synthetic peptide
DRPYYYYMDV

SEQ ID NO: 646 - protein, 6 aa, Artificial Sequence
  Description of Artificial Sequence: Synthetic peptide
QSVSRS

SEQ ID NO: 647 - protein, 8 aa, Artificial Sequence
  Description of Artificial Sequence: Synthetic peptide
GFTFSDFW

SEQ ID NO: 648 - protein, 8 aa, Artificial Sequence
  Description of Artificial Sequence: Synthetic peptide
ISGDSGYT

SEQ ID NO: 649 - protein, 12 aa, Artificial Sequence
  Description of Artificial Sequence: Synthetic peptide
ARDRPYYYYMDV

SEQ ID NO: 650 - protein, 7 aa, Artificial Sequence
  Description of Artificial Sequence: Synthetic peptide
GFTFSDF

SEQ ID NO: 651 - protein, 6 aa, Artificial Sequence
  Description of Artificial Sequence: Synthetic peptide
SGDSGY

SEQ ID NO: 652 - protein, 11 aa, Artificial Sequence [sequence omitted]

SEQ ID NO: 653 - protein, 5 aa, Artificial Sequence
  Description of Artificial Sequence: Synthetic peptide
DYAMH

SEQ ID NO: 654 - protein, 17 aa, Artificial Sequence
  Description of Artificial Sequence: Synthetic peptide
SITSSSAFIDYAASVKG

SEQ ID NO: 655 - protein, 11 aa, Artificial Sequence
  Description of Artificial Sequence: Synthetic peptide
ERVDWNSYFDL

SEQ ID NO: 656 - protein, 7 aa, Artificial Sequence
  Description of Artificial Sequence: Synthetic peptide
QGISNSY

SEQ ID NO: 657 - protein, 8 aa, Artificial Sequence
  Description of Artificial Sequence: Synthetic peptide
GFTFDDYA

SEQ ID NO: 658 - protein, 8 aa, Artificial Sequence
  Description of Artificial Sequence: Synthetic peptide
ITSSSAFI

SEQ ID NO: 659 - protein, 13 aa, Artificial Sequence
  Description of Artificial Sequence: Synthetic peptide
ARERVDWNSYFDL

SEQ ID NO: 660 - protein, 7 aa, Artificial Sequence
  Description of Artificial Sequence: Synthetic peptide
GFTFDDY

SEQ ID NO: 661 - protein, 6 aa, Artificial Sequence
  Description of Artificial Sequence: Synthetic peptide
TSSSAF

SEQ ID NO: 662 - protein, 120 aa, Artificial Sequence
  Description of Artificial Sequence: Synthetic polypeptide
EVQLLESGGGLVQPGGSLRLSCAASGFTFDDYAMHWVRQAPGKGLEWVASITSSSAFIDYADSVKGRFTISRDNSKNTLYLQMNSLRAEDTAVYYCAREPVDWNSYFDLWGQGTLVTVSS

SEQ ID NO: 663 - protein, 108 aa, Artificial Sequence
  Description of Artificial Sequence: Synthetic polypeptide
EIVMTQSPATLSVSPGERATLSCRASQGISNSYLAWYQQKPGQAPRLLIYGASTRATGIPARFSGSGSGTEFTLTISSLQSEDFAVYYCQQYYTYPPTFGQGTKVEIK

SEQ ID NO: 664 - protein, 120 aa, Artificial Sequence
  Description of Artificial Sequence: Synthetic polypeptide
EVQLLESGGGLVQPGGSLRLSCAASGFTFDDYAMHWVRQAPGKGLEWVASITSSSAFIDYADSVKGRFTISRDNSKNTLYLQMNSLRAEDTAVYYCARERVDWNSYFDLWGQGTLVTVSS

SEQ ID NO: 665 - protein, 120 aa, Artificial Sequence
  Description of Artificial Sequence: Synthetic polypeptide
EVQLLESGGGLVQPGGSLRLSCAASGFTFDDYAMHWVRQAPGKGLEWVASITSSSAFIDYADSVKGRFTISRDNSKNTLYLQMNSLRAEDTAVYYCARERVDWNSYFDNWGQGTLVTVSS

SEQ ID NO: 666 - protein, 120 aa, Artificial Sequence
  Description of Artificial Sequence: Synthetic polypeptide
EVQLLESGGGLVQPGGSLRLSCAASGFTLDDYAMHWVRQAPGKGLEWVASITSSSAFIDYADSVKGRFTISRDNSKNTLYLQMNSLRAEDTAVYYCARERVDWNSYFDNWGQGTLVTVSS

SEQ ID NO: 667 - protein, 107 aa, Artificial Sequence
  Description of Artificial Sequence: Synthetic polypeptide
EIVMTQSPATLSVSPGERATLSCRASQSVGSYLAWYQQKPGQAPRLLIYDASTRVTGIPARFSGSGSGTEFTLTISSLQSEDFAVYYCQQYYTYPPTFGQGTKVEIK

SEQ ID NO: 668 - protein, 120 aa, Artificial Sequence
  Description of Artificial Sequence: Synthetic polypeptide
EVQLLESGGGLVQPGGSLRLSCAASGFTFDDYAMHWVRQAPRKGLEWVASITSSSAFIDYADSVKGRFTISRDNSKNTLYLQMNSLRAEDTAVYYCARERVLWNSYFDLWGQGTLVTVSS

SEQ ID NO: 669 - protein, 108 aa, Artificial Sequence
  Description of Artificial Sequence: Synthetic polypeptide
EIVMTQSPATLSVSPGERATLSCRASQGISNSYLAWYQQKPGQAPRLLIYGASTRATGIPARFSGSGSGTEFTLTISSLQSEDFAVYYCQQYERWPPTFGQGTKVEIK

SEQ ID NO: 670 - protein, 108 aa, Artificial Sequence
  Description of Artificial Sequence: Synthetic polypeptide
EIVMTQSPATLSVSPGERATLSCRACQGISNSYLAWYQQKPGQAPRLLIYGASTRATGIPARFSGSGSGTEFTLTISSLQSEDFAVYYCQQYYTYPPTFGQGTKVEIK

SEQ ID NO: 671 - protein, 107 aa, Artificial Sequence
  Description of Artificial Sequence: Synthetic polypeptide
EIVMTQSPATLSVSPGERATLSCRASQSVGSYLAWYQQKPGQAPRLLIYDASARATGIPARFSGSGSGTEFTLTISSLQSEDFAVYYCQQYYTYPPTFGQGTKVEIK

SEQ ID NO: 672 - protein, 120 aa, Artificial Sequence
  Description of Artificial Sequence: Synthetic polypeptide
EVQLLESGGGLVQPGGSLRLSCAASGFTLDDYAMHWVRQAPGKGLEWVASITSSSAFIDYADSVKGRFTISRDNSKNTLYLQMNSLRAEDTAVYYCARERVDWNSYFDLWGQGTLVTVSS

SEQ ID NO: 673 - protein, 108 aa, Artificial Sequence
  Description of Artificial Sequence: Synthetic polypeptide
EIVMTQSPATLSVSPGERATLSCRASQGISNSYLAWYQQKPGQAPRLLIYGASTRATGIPARFSGSGSGTEFTLTISSLQSEDFAVYYCQQYYKYPPTFGQGTKVEIK

SEQ ID NO: 674 - protein, 108 aa, Artificial Sequence
  Description of Artificial Sequence: Synthetic polypeptide
EIVMTQSPATLSVSPGERATLSCRASQGISNNYLAWYQQKPGQAPRLLIYGASTRATGIPARFSGSGSGTEFTLTISSLQSEDFAVYYCQQYYTYPPTFGQGTKVEIK

SEQ ID NO: 675 - protein, 108 aa, Artificial Sequence
  Description of Artificial Sequence: Synthetic polypeptide
EIVMTQSPATLSVSPGERATLSCRACPGISNSYLAWYQQKPGQAPRLLIYGASTRATGIPARFSGSGSGTEFTLTISSLQSEDFAVYYCQQYYTYPPTFGQGTKVEIK

SEQ ID NO: 676 - protein, 120 aa, Artificial Sequence
  Description of Artificial Sequence: Synthetic polypeptide
EVQLLESGGGLVQPGGSLRLSCAASGFTFDDYAMHWVRQAPGKGLEWVASITSSSAFIDYADSVKGRFTISRDNSKNTLYLQMNSLRAEDTAVYYCARERVLWNSYFDLWGQGTLVTVSS

SEQ ID NO: 677 - protein, 107 aa, Artificial Sequence
  Description of Artificial Sequence: Synthetic polypeptide
EIVMTQSPATLSVSPGERATLSCRASQNVNNNLAWYQQKPGQAPRLLIYDATTRATGIPARFSGSGSGTEFTLTISSLQSEDFAVYYCQQYYHWPQTFGQGTKVEIK

SEQ ID NO: 678 - protein, 108 aa, Artificial Sequence
  Description of Artificial Sequence: Synthetic polypeptide
EIVMTQSPATLSVSPGERATLSCRASQNVNNNYLAWYQQKPGQAPRLLIYDATTRATGIPARFSGSGSGTEFTLTISSLQSEDFAVYYCQQYYHWPQTFGQGTKVEIK

SEQ ID NO: 679 - protein, 107 aa, Artificial Sequence
  Description of Artificial Sequence: Synthetic polypeptide
EIVMTQSPATLSVSPGERATLSCRASQGVNNNLAWYQQKPGQAPRLLIYDATTRATGIPARFSGSGSGTEFTLTISSLQSEDFAVYYCQQYYHWPQTFGQGTKVEIK

SEQ ID NO: 680 - protein, 107 aa, Artificial Sequence
  Description of Artificial Sequence: Synthetic polypeptide
EIVMTQSPATLSVSPGERATLSCRASQNINNNLAWYQQKPGQAPRLLIYDATTRATGIPARFSGSGSGTEFTLTISSLQSEDFAVYYCQQYYHWPQTFGQGTKVEIK

SEQ ID NO: 681 - protein, 107 aa, Artificial Sequence
  Description of Artificial Sequence: Synthetic polypeptide
EIVMTQSPATLSVSPGERATLSCRASQNVSNNLAWYQQKPGQAPRLLIYDATTRATGIPARFSGSGSGTEFTLTISSLQSEDFAVYYCQQYYHWPQTFGQGTKVEIK

SEQ ID NO: 682 - protein, 107 aa, Artificial Sequence
  Description of Artificial Sequence: Synthetic polypeptide
EIVMTQSPATLSVSPGERATLSCRASQNVNNSLAWYQQKPGQAPRLLIYDATTRATGIPARFSGSGSGTEFTLTISSLQSEDFAVYYCQQYYHWPQTFGQGTKVEIK

SEQ ID NO: 683 - protein, 107 aa, Artificial Sequence
  Description of Artificial Sequence: Synthetic polypeptide
EIVMTQSPATLSVSPGERATLSCRASQNVNNNLAWYQQKPGQAPRLLIYGATTRATGIPARFSGSGSGTEFTLTISSLQSEDFAVYYCQQYYHWPQTFGQGTKVEIK

SEQ ID NO: 684 - protein, 107 aa, Artificial Sequence
  Description of Artificial Sequence: Synthetic polypeptide
EIVMTQSPATLSVSPGERATLSCRASQNVNNNLAWYQQKPGQAPRLLIYDASTRATGIPARFSGSGSGTEFTLTISSLQSEDFAVYYCQQYYHWPQTFGQGTKVEIK

SEQ ID NO: 685 - protein, 107 aa, Artificial Sequence
  Description of Artificial Sequence: Synthetic polypeptide
EIVMTQSPATLSVSPGERATLSCRASQNVNNNLAWYQQKPGQAPRLLIYDATTRATGIPARFSGSGSGTEFTLTISSLQSEDFAVYYCQQYYTWPQTFGQGTKVEIK

SEQ ID NO: 686 - protein, 107 aa, Artificial Sequence
  Description of Artificial Sequence: Synthetic polypeptide
EIVMTQSPATLSVSPGERATLSCRASQNVNNNLAWYQQKPGQAPRLLIYDATTRATGIPARFSGSGSGTEFTLTISSLQSEDFAVYYCQQYYHYPQTFGQGTKVEIK

SEQ ID NO: 687 - protein, 107 aa, Artificial Sequence
  Description of Artificial Sequence: Synthetic polypeptide
EIVMTQSPATLSVSPGERATLSCRASQNVNNNLAWYQQKPGQAPRLLIYDATTRATGIPARFSGSGSGTEFTLTISSLQSEDFAVYYCQQYYHWPPTFGQGTKVEIK

SEQ ID NO: 688 - protein, 120 aa, Artificial Sequence
  Description of Artificial Sequence: Synthetic polypeptide
EVQLLESGGGLVQPGGSLRLSCAASGFIFDDYAMHWVRQAPGKGLEWVASITSSSAFIDYADSVKGRFTISRDNSKNTLYLQMNSLRAEDTAVYYCARERVDWFSYFDLWGQGTLVTVSS

SEQ ID NO: 689 - protein, 107 aa, Artificial Sequence
  Description of Artificial Sequence: Synthetic polypeptide
EIVMTQSPATLSVSPGERATLSCRASQSVSNNLVWYQQKPGQAPRLLIYDASTRATGIPARFSGSGSGTEFTLTISSLQSEDFAVYYCQQYSHWPPTFGQGTKVEIK

SEQ ID NO: 690 - protein, 107 aa, Artificial Sequence
  Description of Artificial Sequence: Synthetic polypeptide
EIVMTQSPATLSVSPGERATLSCRASQSVYSNLAWYQQKPGQAPRLLIYRASTRATGIPARFSGSGSGTEFTLTISSLQSEDFAVYYCQQYHIWPPTFGQGTKVEIK

SEQ ID NO: 691 - protein, 119 aa, Artificial Sequence
  Description of Artificial Sequence: Synthetic polypeptide
EVQLLESGGGLVQPGGSLRLSCAASGFAFSNFAMSWVRQAPGKGLEWSTITSSGGSTDYADSVKGRFTISRDNSKNTLYLQMNSLRAEDTAVYYKARERVDWNSYFNLWGQGTLVTVSS

SEQ ID NO: 692 - protein, 107 aa, Artificial Sequence
  Description of Artificial Sequence: Synthetic polypeptide
EIVMTQSPATLSVSPGERATLSCRASQSVTSDLAWYQQKPGQAPRLLIYDASSRAMGIPARFSGSGSGTEFTLTISSLQSEDFAVYYCQQYSTWPPTFGQGTKVEIK

SEQ ID NO: 693 - protein, 121 aa, Artificial Sequence
  Description of Artificial Sequence: Synthetic polypeptide
EVQLLESGGGLVQPGGSLRLSCAASGFTFSSFALSWVRQAPGKGLEWSSISSSGSGGSTNYADSVKGRFTISRDNSKNTLYLQMNSLRAEDTAVYYCIRERVDWNSYFDLWGQGTLVTVSS

SEQ ID NO: 694 - protein, 107 aa, Artificial Sequence
  Description of Artificial Sequence: Synthetic polypeptide
EIVMTQSPATLSVSPGERATLSCRASQSVTRNLAWYQQKPGQAPRLLIYGESTRATGIPARFSGSGSGTEFTLTISSLQSEDFAVYYCQQYYNWPPSFGQGTKVEIK

SEQ ID NO: 695 - protein, 119 aa, Artificial Sequence
  Description of Artificial Sequence: Synthetic polypeptide
EVQLLESGGGLVQPGGSLRLSCAASGFTFNDYAMTWVRQAPGKGLEWASISSSGGSIDYADSVKGRFTISRDNSKNTLYLQMNSLRAEDTAVYYCAREKVDWNSYFDLWGQGTLVTVSS

SEQ ID NO: 696 - protein, 107 aa, Artificial Sequence
  Description of Artificial Sequence: Synthetic polypeptide
EIVMTQSPATLSVSPGERATLSCRASQSVSNTLAWYQQKPGQAPRLLIYGTSNRAAGIPARFSGSGSGTEFTLTISSLQSEDFAVYYCQQYYTTPLTFGQGTKVEIK

SEQ ID NO: 697 - protein, 119 aa, Artificial Sequence
  Description of Artificial Sequence: Synthetic polypeptide
EVQLLESGGGLVQPGGSLRLSCAASGFTFSDYAMTWVRQAPGKGLEWSAISTSGGSTYYVDSVKGRFTISRDNSKNTLYLQMNSLRAEDTAVYYCARERVDWNSYFDLWGQGTLVTVSS

SEQ ID NO: 698 - protein, 107 aa, Artificial Sequence
  Description of Artificial Sequence: Synthetic polypeptide
EIVMTQSPATLSVSPGERATLSCRASQSVISNLAWYQQKPGQAPRLLIYGASTGATGIPARFSGSGSGTEFTLTISSLQSEDFAVYYCQQYNNRPPTFGQGTKVEIK

SEQ ID NO: 699 - protein, 119 aa, Artificial Sequence
  Description of Artificial Sequence: Synthetic polypeptide
EVQLLESGGGLVQPGGSLRLSCAASGLTFSSHAMSWVRQAPGKGLEWAAITGSGGNTYYADSVKGRFTISRDNSKNTLYLQMNSLRAEDTAVYYCARERSDWNSYFDLHGQGTLVTVSS

SEQ ID NO: 700 - protein, 107 aa, Artificial Sequence
  Description of Artificial Sequence: Synthetic polypeptide
EIVMTQSPATLSVSPGERATLSCRASQSVDNNLAWYQQKPGQAPRLLIYGASTRDTGIPARFSGSGSGTEFTLTISSLQSEDFAVYYCQQYNYWPPTFGQGTKVEIK

SEQ ID NO: 701 - protein, 120 aa, Artificial Sequence
  Description of Artificial Sequence: Synthetic polypeptide
EVQLLESGGGLVQPGGSLRLSCAASGFTFDDYAMHWVRQAPGKGLEWVASITSSSAFIDYADSVKGRFTISRDNSKNTLYLQMNSLRAEDTAVYYCARERVDWWSYFDLWGQGTLVTVSS

SEQ ID NO: 702 - protein, 107 aa, Artificial Sequence
  Description of Artificial Sequence: Synthetic polypeptide
EIVMTQSPATLSVSPGERATLSCRASQSISNNLAWYQQKPGQAPRLLIYDVSTRATGIPARFSGSGSGTEFTLTISSLQSEDFAVYYCQQYSLWPPTFGQGTKVEIK

SEQ ID NO: 703 - protein, 119 aa, Artificial Sequence
  Description of Artificial Sequence: Synthetic polypeptide
EVQLLESGGGLVQPGGSLRLSCAASGFTLSSYGMSWVRQAPGKGLEWASITGSGDTSYYADSVKGRFTISRDNSKNTLYLQMNSLRAEDTAVYYCARERVDWNSYFDRWGQGTLVTVSS

SEQ ID NO: 704 - protein, 107 aa, Artificial Sequence
  Description of Artificial Sequence: Synthetic polypeptide
EIVMTQSPATLSVSPGERATLSCRASRSISSNLAWYQQKPGQAPRLLIYDAFTRATGIPARFSGSGSGTEFTLTISSLQSEDFAVYYCQQYDTWPETFGQGTKVEIK

SEQ ID NO: 705 - protein, 119 aa, Artificial Sequence
  Description of Artificial Sequence: Synthetic polypeptide
EVQLLESGGGLVQPGGSLRLSCAASGFTFSTYVMTWVRQAPGKGLEWASISYSGGFIYYADSVKGRFTISRDNSKNTLYLQMNSLRAEDTAVYYCARERVMWNSYFDLWGQGTLVTVSS

SEQ ID NO: 706 - protein, 107 aa, Artificial Sequence
  Description of Artificial Sequence: Synthetic polypeptide
EIVMTQSPATLSVSPGERATLSCRASQSVSVNLAWYQQKPGQAPRLLIYDVSIRATGIPARFSGSGSGTEFTLTISSLQSEDFAVYYCQQYTTWPPTFGQGTKVEIK

SEQ ID NO: 707 - protein, 120 aa, Artificial Sequence
  Description of Artificial Sequence: Synthetic polypeptide
EVQLLESGGGLVQPGGSLRLSCAASGFTFDDYAMHWVRQAPGKGLEWVASITSSSAFIDYADSVKGRFTISRDNSKNTLYLQMNSLRAEDTAVYYCNRERVDWNSYFDLWGQGTLVTVSS

SEQ ID NO: 708 - protein, 107 aa, Artificial Sequence
  Description of Artificial Sequence: Synthetic polypeptide
EIVMTQSPATLSVSPGERATLSCRASQSVNNYLAWYQQKPGQAPRLLIYDTSSRATGIPARFSGSGSGTEFTLTISSLQSEDFAVYYCQQYHSWPPTFGQGTKVEIK

SEQ ID NO: 709 - protein, 119 aa, Artificial Sequence
  Description of Artificial Sequence: Synthetic polypeptide
EVQLLESGGGLVQPGGSLRLSCAASGFIFSDYAMSWVRQAPGKGLEWSAISGSGGSTYYTDSVKGRFTISRDNSKNTLYLQMNSLRAEDTAVYYCAREMVDWNSYFDLWGQGTLVTVSS

SEQ ID NO: 710 - protein, 107 aa, Artificial Sequence
  Description of Artificial Sequence: Synthetic polypeptide
EIVMTQSPATLSVSPGERATLSCRASQSITTNLAWYQQKPGQAPRLLIYSASTRATGIPARFSGSGSGTEFTLTISSLQSEDFAVYYCQQYYDWPFTFGQGTKVEIK

SEQ ID NO: 711 - protein, 120 aa, Artificial Sequence
  Description of Artificial Sequence: Synthetic polypeptide
EVQLLESGGGLVQPGGSLRLSCAASGFTFDDYAMHWVRQAPGKGLEWVASITSSSAFIDYADSVKGRFTISRDNSKNTLYLQMNSLRAEDTAVYYCAQERVDWNSYFDLWGQGTLVTVSS

SEQ ID NO: 712 - protein, 119 aa, Artificial Sequence
  Description of Artificial Sequence: Synthetic polypeptide
EVQLLESGGGLVQPGGSLRLSCAASGFTFRNYAMTWVRQAPGKGLEWSSISSSGGSTYYADSVKGRFTISRDNSKNTLYLQMNSLRAEDTAVYYCARERVDYNSYFDLWGQGTLVTVSS

SEQ ID NO: 713 - protein, 107 aa, Artificial Sequence
  Description of Artificial Sequence: Synthetic polypeptide
EIVMTQSPATLSVSPGERATLSCRASQSIGNNLAWYQQKPGQAPRLLIYDVSTRATGIPARFSGSGSGTEFTLTISSLQSEDFAVYYCQQYKHWPPTFGQGTKVEIK

SEQ ID NO: 714 - protein, 119 aa, Artificial Sequence
  Description of Artificial Sequence: Synthetic polypeptide
EVQLLESGGGLVQPGGSLRLSCAASGFTLRNYAMSWVRQAPGKGLEWSAISGSGGSTSYADSVKGRFTISRDNSKNTLYLQMNSLRAEDTAVYYCDRERVDWNSYFDLWGQGTLVTVSS

SEQ ID NO: 715 - protein, 107 aa, Artificial Sequence
  Description of Artificial Sequence: Synthetic polypeptide
EIVMTQSPATLSVSPGERATLSCRASQSVSNNVAWYQQKPGQAPRLLIYASSTRATGIPARFSGSGSGTEFTLTISSLQSEDFAVYYCQQYNTWPFTFGQGTKVEIK

SEQ ID NO: 716 - protein, 119 aa, Artificial Sequence
  Description of Artificial Sequence: Synthetic polypeptide
EVQLLESGGGLVQPGGSLRLSCAASGFTFDTYAMNWVRQAPGKGLEWFGISGSGGSPYYADSVKGRFTISRDNSKNTLYLQMNSLRAEDTAVYYCARERVLWNSYFDLWGQGTLVTVSS

SEQ ID NO: 717 - protein, 107 aa, Artificial Sequence
  Description of Artificial Sequence: Synthetic polypeptide
EIVMTQSPATLSVSPGERATLSCRASQSFSSNLAWYQQKPGQAPRLLIYGASTRSTGIPARFSGSGSGTEFTLTISSLQSEDFAVYYCQQYYDWPITFGQGTKVEIK

SEQ ID NO: 718 - protein, 119 aa, Artificial Sequence
  Description of Artificial Sequence: Synthetic polypeptide
EVQLLESGGGLVQPGGSLRLSCAASGFTFSDYALSWVRQAPGKGLEWSTISGSGGNTYYADSVKGRFTISRDNSKNTLYLQMNSLRAEDTAVYYCERERVDWNSYFDLWGQGTLVTVSS

SEQ ID NO: 719 - protein, 107 aa, Artificial Sequence
  Description of Artificial Sequence: Synthetic polypeptide
EIVMTQSPATLSVSPGERATLSCRASQSIRNNLAWYQQKPGQAPRLLIYDASSRATGIPARFSGSGSGTEFTLTISSLQSEDFAVYYCQQYYIWPLTFGQGTKVEIK

SEQ ID NO: 720 - protein, 119 aa, Artificial Sequence
  Description of Artificial Sequence: Synthetic polypeptide
EVQLLESGGGLVQPGGSLRLSCAASGFTFSSSAMSWVRQAPGKGLEWSAISGSGGSTYYTDSVKGRFTISRDNSKNTLYLQMNSLRAEDTAVYYCAREVVDWNSYFDLWGQGTLVTVSS

SEQ ID NO: 721 - protein, 107 aa, Artificial Sequence
  Description of Artificial Sequence: Synthetic polypeptide
EIVMTQSPATLSVSPGERATLSCRASQSISSDLAWYQQKPGQAPRLLIYGASTTATGIPARFSGSGSGTEFTLTISSLQSEDFAVYYCQQYSTWPLTFGQGTKVEIK

SEQ ID NO: 722 - protein, 119 aa, Artificial Sequence
  Description of Artificial Sequence: Synthetic polypeptide
EVQLLESGGGLVQPGGSLRLSCAASGFTFSTHAMTWVRQAPGKGLEWSTISGSGATTEYADSVKGRFTISRDNSKNTLYLQMNSLRAEDTAVYYCARETVDWNSYFDLWGQGTLVTVSS

SEQ ID NO: 723 - protein, 107 aa, Artificial Sequence
  Description of Artificial Sequence: Synthetic polypeptide
EIVMTQSPATLSVSPGERATLSCRASQSVSNDLAWYQQKPGQAPRLLIYDASTRVTGIPARFSGSGSGTEFTLTISSLQSEDFAVYYCQQYNHWPPTFGQGTKVEIK

SEQ ID NO: 724 - protein, 119 aa, Artificial Sequence
  Description of Artificial Sequence: Synthetic polypeptide
EVQLLESGGGLVQPGGSLRLSCAASGFTFSNYPMTWVRQAPGKGLEWSSISWSGGSIDYDDSVKGRFTISRDNSKNTLYLQMNSLRAEDTAVYYCAREHVDWNSYFDLWGQGTLVTVSS

SEQ ID NO: 725 - protein, 107 aa, Artificial Sequence
  Description of Artificial Sequence: Synthetic polypeptide
EIVMTQSPATLSVSPGERATLSCRASQNVRSNLAWYQQKPGQAPRLLIYDASTTATGIPARFSGSGSGTEFTLTISSLQSEDFAVYYCQQYDTWPLTFGQGTKVEIK

SEQ ID NO: 726 - protein, 119 aa, Artificial Sequence
  Description of Artificial Sequence: Synthetic polypeptide
EVQLLESGGGLVQPGGSLRLSCAASGFTFRDYAMSWVRQAPGKGLEWSSISGSGGSIDYADSVKGRFTISRDNSKNTLYLQMNSLRAEDTAVYYCARERVDWNSYFDAWGQGTLVTVSS

SEQ ID NO: 727 - protein, 107 aa, Artificial Sequence
  Description of Artificial Sequence: Synthetic polypeptide
EIVMTQSPATLSVSPGERATLSCRASQSVSSLLAWYQQKPGQAPRLLIYAASTRATGIPARFSGSGSGTEFTLTISSLQSEDFAVYYCQQYGTWPQTFGQGTKVEIK

SEQ ID NO: 728 - protein, 119 aa, Artificial Sequence
  Description of Artificial Sequence: Synthetic polypeptide
EVQLLESGGGLVQPGGSLRLSCAASGFTLSSYAMSWVRQAPGKGLEWAGISGSGGRTYYADSVKGRFTISRDNSKNTLYLQMNSLRAEDTAVYYCARIRVDWNSYFDLWGQGTLVTVSS

SEQ ID NO: 729 - protein, 107 aa, Artificial Sequence
  Description of Artificial Sequence: Synthetic polypeptide
EIVMTQSPATLSVSPGERATLSCRASQSFSSNLAWYQQKPGQAPRLLIYDVSTRATGIPARFSGSGSGTEFTLTISSLQSEDFAVYYCQQYNHWPPTFGQGTKVEIK

SEQ ID NO: 730 - protein, 119 aa, Artificial Sequence
  Description of Artificial Sequence: Synthetic polypeptide
EVQLLESGGGLVQPGGSLRLSCAASGFTFNNYAMNWVRQAPGKGLEWSAISGSGGRTHYADSVKGRFTISRDNSKNTLYLQMNSLRAEDTAVYYCARERLDINSYFDLWGQGTLVTVSS

SEQ ID NO: 731 - protein, 107 aa, Artificial Sequence
  Description of Artificial Sequence: Synthetic polypeptide
EIVMTQSPATLSVSPGERATLSCRASQTVSSNLAWYQQKPGQAPRLLIYDAFTRATGIPARFSGSGSGTEFTLTISSLQSEDFAVYYCQQYGTWPLTFGQGTKVEIK

SEQ ID NO: 732 - protein, 120 aa, Artificial Sequence
  Description of Artificial Sequence: Synthetic polypeptide
EVQLLESGGGLVQPGGSLRLSCAASGFTFDDYAMHWVRQAPGKGLEWVASITSSSAFIDYADSVKGRFTISRDNSKNTLYLQMNSLRAEDTAVYYCARERVDWLSYFDLWGQGTLVTVSS

SEQ ID NO: 733 - protein, 107 aa, Artificial Sequence
  Description of Artificial Sequence: Synthetic polypeptide
EIVMTQSPATLSVSPGERATLSCRASQSVYSNLAWYQQKPGQAPRLLIYGASTTATGIPARFSGSGSGTEFTLTISSLQSEDFAVYYCQQYHNWPPTFGQGTKVEIK

SEQ ID NO: 734 - protein, 119 aa, Artificial Sequence
  Description of Artificial Sequence: Synthetic polypeptide
EVQLLESGGGLVQPGGSLRLSCAASGLTFSSYAMNWVRQAPGKGLEWSAISGTGGSTYYADSVKGRFTISRDNSKNTLYLQMNSLRAEDTAVYYCARERVDWNNYFDLWGQGTLVTVSS

SEQ ID NO: 735 - protein, 108 aa, Artificial Sequence
  Description of Artificial Sequence: Synthetic polypeptide
EIVMTQSPATLSVSPGERATLSCRASQGISNSYLAWYQQKPGQAPRLLIYYASTRATGIPARFSGSGSGTEFTLTISSLQSEDFAVYYCQQYSDWPPTFGQGTKVEIK

SEQ ID NO: 736 - protein, 119 aa, Artificial Sequence
  Description of Artificial Sequence: Synthetic polypeptide
EVQLLESGGGLVQPGGSLRLSCAASGFTFTTYALSWVRQAPGKGLEWAAISGSGSNTYYADSVKGRFTISRDNSKNTLYLQMNSLRAEDTAVYYCARERVDWNVYFDLWGQGTLVTVSS

SEQ ID NO: 737 - protein, 107 aa, Artificial Sequence
  Description of Artificial Sequence: Synthetic polypeptide
EIVMTQSPATLSVSPGERATLSCRASQSVGTDLAWYQQKPGQAPRLLIYGASIRAIGIPARFSGSGSGTEFTLTISSLQSEDFAVYYCQQYYKWPETFGQGTKVEIK

SEQ ID NO: 738 - protein, 119 aa, Artificial Sequence
  Description of Artificial Sequence: Synthetic polypeptide
EVQLLESGGGLVQPGGSLRLSCAASGLTFSNYAMAWVRQAPGKGLEWAAISSSSGGTFYADSVKGRFTISRDNSKNTLYLQMNSLRAEDTAVYYCAREHVDWNSYFDLWGQGTLVTVSS

SEQ ID NO: 739 - protein, 107 aa, Artificial Sequence
  Description of Artificial Sequence: Synthetic polypeptide
EIVMTQSPATLSVSPGERATLSCRASQSVSSNLAWYQQKPGQAPRLLIYDVSIRATGIPARFSGSGSGTEFTLTISSLQSEDFAVYYCQQYYVWPDTFGQGTKVEIK

SEQ ID NO: 740 - protein, 119 aa, Artificial Sequence
  Description of Artificial Sequence: Synthetic polypeptide
EVQLLESGGGLVQPGGSLRLSCAASGFAFSNHAMNWVRQAPGKGLEWSAISSSGGSIDYADSVKGRFTISRDNSKNTLYLQMNSLRAEDTAVYYCARERVIWNSYFDLWGQGTLVTVSS

SEQ ID NO: 741 - protein, 107 aa, Artificial Sequence
  Description of Artificial Sequence: Synthetic polypeptide
EIVMTQSPATLSVSPGERATLSCRASQSVSTNFAWYQQKPGQAPRLLIYGASSRATGIPARFSGSGSGTEFTLTISSLQSEDFAVYYCQQYYKWPPLFGQGTKVEIK

SEQ ID NO: 742 - protein, 119 aa, Artificial Sequence
  Description of Artificial Sequence: Synthetic polypeptide
EVQLLESGGGLVQPGGSLRLSCAASGFTFTNYAMTWVKQAPGKGLEWSSITGSGGNTDYADSVKGRFTISRDNSKNTLYLQMNSLRAEDTAVYYCARERDDWNSYFDLWGQGTLVTVSS

SEQ ID NO: 743 - protein, 107 aa, Artificial Sequence
  Description of Artificial Sequence: Synthetic polypeptide
EIVMTQSPATLSVSPGERATLSCRASQSVSRNLAWYQQKPGQAPRLLIYGASSRVTGIPARFSGSGSGTEFTLTISSLQSEDFAVYYCQQYKTLPHTFGQGTKVEIK

SEQ ID NO: 744 - protein, 119 aa, Artificial Sequence
  Description of Artificial Sequence: Synthetic polypeptide
EVQLLESGGGLVQPGGSLRLSCAASGFTFTSYAMNWVRQAPGKGLEWSAISGSGGSTDYADSVKGRFTISRDNSKNTLYLQMNSLRAEDTAVYYFARERVDWNSYFDLWGQGTLVTVSS

SEQ ID NO: 745 - protein, 107 aa, Artificial Sequence
  Description of Artificial Sequence: Synthetic polypeptide
EIVMTQSPATLSVSPGERATLSCRASQSVGTNLAWYQQKPGQAPRLLIYGASTRATGIPARFSGSGSGTEFTLTISSLQSEDFAVYYCQQYYDIPETFGQGTKVEIK

SEQ ID NO: 746 - protein, 119 aa, Artificial Sequence
  Description of Artificial Sequence: Synthetic polypeptide
EVQLLESGGGLVQPGGSLRLSCAASGFAFSTYAMSWVRQAPGKGLEWSAISGSGGSTYHADSVKGRFTISRDNSKNTLYLQMNSLRAEDTAVYYCARERVDWNSYNDLWGQGTLVTVSS

SEQ ID NO: 747 - protein, 107 aa, Artificial Sequence
  Description of Artificial Sequence: Synthetic polypeptide
EIVMTQSPATLSVSPGERATLSCRASQSVSSYLAWYQQKPGQAPRLLIYGASTWATGIPARFSGSGSGTEFTLTISSLQSEDFAVYYCQQYTTWPRTFGQGTKVEIK

SEQ ID NO: 748 - protein, 119 aa, Artificial Sequence
  Description of Artificial Sequence: Synthetic polypeptide
EVQLLESGGGLVQPGGSLRLSCAASGFTFSNYAMDWVRQAPGKGLEWSGIGGSGGSTYYADSVKGRFTISRDNSKNTLYLQMNSLRAEDTAVYYCARERVDWNSYFYLWGQGTLVTVSS

SEQ ID NO: 749 - protein, 107 aa, Artificial Sequence
  Description of Artificial Sequence: Synthetic polypeptide
EIVMTQSPATLSVSPGERATLSCRASQTVGSNLAWYQQKPGQAPRLLIYAASNRATGIPARFSGSGSGTEFTLTISSLQSEDFAVYYCQQYKIWPPTFGQGTKVEIK

SEQ ID NO: 750 - protein, 119 aa, Artificial Sequence
  Description of Artificial Sequence: Synthetic polypeptide
EVQLLESGGGLVQPGGSLRLSCAASGFTFSNFAMNWVRQAPGKGLEWSVITGSGGSTYYADSVKGRFTISRDNSKNTLYLQMNSLRAEDTAVYYCAREMVDWNSYFDLWGQGTLVTVSS

SEQ ID NO: 751 - protein, 107 aa, Artificial Sequence
  Description of Artificial Sequence: Synthetic polypeptide
EIVMTQSPATLSVSPGERATLSCRASQSVTSKLAWYQQKPGQAPRLLIYSASTRAAGIPARFSGSGSGTEFTLTISSLQSEDFAVYYCQQYSHWPPTFGQGTKVEIK

SEQ ID NO: 752 - protein, 119 aa, Artificial Sequence
  Description of Artificial Sequence: Synthetic polypeptide
EVQLLESGGGLVQPGGSLRLSCAASGFTFSNYAMHWVRQAPGKGLEWSAISTSGGSTYYADSVKGRFTISRDNSKNTLYLQMNSLRAEDTAVYYCALERADWNSYFDLWGQGTLVTVSS

SEQ ID NO: 753 - protein, 107 aa, Artificial Sequence
  Description of Artificial Sequence: Synthetic polypeptide
EIVMTQSPATLSVSPGERATLSCRASQSVKSNLAWYQQKPGQAPRLLIYAASSRATGIPARFSGSGSGTEFTLTISSLQSEDFAVYYCQQYDTWPLTFGQGTKVEIK

SEQ ID NO: 754 - protein, 119 aa, Artificial Sequence
  Description of Artificial Sequence: Synthetic polypeptide
EVQLLESGGGLVQPGGSLRLSCAASGFSFSIYAMSWVRQAPGKGLEWSAISGSGTSTYYADSVKGRFTISRDNSKNTLYLQMNSLRAEDTAVYYCWRERVDWNSYFDLWGQGTLVTVSS

SEQ ID NO: 755 - protein, 107 aa, Artificial Sequence
  Description of Artificial Sequence: Synthetic polypeptide
EIVMTQSPATLSVSPGERATLSCRASQSIGSSLAWYQQKPGQAPRLLIYDTSIRATGIPARFSGSGSGTEFTLTISSLQSEDFAVYYCQQYSHWPPTFGQGTKVEIK

SEQ ID NO: 756 - protein, 119 aa, Artificial Sequence
  Description of Artificial Sequence: Synthetic polypeptide
EVQLLESGGGLVQPGGSLRLSCAASGFSFSGYAMSWVRQAPGKGLEWSSITSSGGSTYYADSVKGRFTISRDNSKNTLYLQMNSLRAEDTAVYYCARERVDWNSYFDRWGQGTLVTVSS

SEQ ID NO: 757 - protein, 107 aa, Artificial Sequence
  Description of Artificial Sequence: Synthetic polypeptide
EIVMTQSPATLSVSPGERATLSCRASQSITSNLAWYQQKPGQAPRLLIYGTSSRATGIPARFSGSGSGTEFTLTISSLQSEDFAVYYCQQYYIWPLTFGQGTKVEIK

SEQ ID NO: 758 - protein, 119 aa, Artificial Sequence
  Description of Artificial Sequence: Synthetic polypeptide
EVQLLESGGGLVQPGGSLRLSCAASGFTFSRYGMSWVRQAPGKGLEWSAISGTGGSTYYADSVKGRFTISRDNSKNTLYLQMNSLRAEDTAVYYHARERVDWNSYFDLWGQGTLVTVSS

SEQ ID NO: 759 - protein, 107 aa, Artificial Sequence
  Description of Artificial Sequence: Synthetic polypeptide
EIVMTQSPATLSVSPGERATLSCRASQSISDNLAWYQQKPGQAPRLLIYDASTRAPGIPARFSGSGSGTEFTLTISSLQSEDFAVYYCQQYDIWPPTFGQGTKVEIK

SEQ ID NO: 760 - protein, 119 aa, Artificial Sequence
  Description of Artificial Sequence: Synthetic polypeptide
EVQLLESGGGLVQPGGSLRLSCAASGFTFSSFALSWVRQAPGKGLEWSTISGSGVNTYYADSVKGRFTISRDNSKNTLYLQMNSLRAEDTAVYYCARERVDWNSYFDLLGQGTLVTVSS

SEQ ID NO: 761 - protein, 107 aa, Artificial Sequence
  Description of Artificial Sequence: Synthetic polypeptide
EIVMTQSPATLSVSPGERATLSCRASQSLSTNLAWYQQKPGQAPRLLIYRASIRATGIPARFSGSGSGTEFTLTISSLQSEDFAVYYCQQYDTWPLTFGQGTKVEIK

SEQ ID NO: 762 - protein, 119 aa, Artificial Sequence
  Description of Artificial Sequence: Synthetic polypeptide
EVQLLESGGGLVQPGGSLRLSCAASGFAFSNYAMSWVRQAPGKGLEWSSISSSGGSTDYADSVKGRFTISRDNSKNTLYLQMNSLRAEDTAVYYTARERVDWNSYFDLWGQGTLVTVSS

SEQ ID NO: 763 - protein, 107 aa, Artificial Sequence
  Description of Artificial Sequence: Synthetic polypeptide
EIVMTQSPATLSVSPGERATLSCRASQSVSSDLVWYQQKPGQAPRLLIYGASTTATGIPARFSGSGSGTEFTLTISSLQSEDFAVYYCQQYYSWPKTFGQGTKVEIK

SEQ ID NO: 764 - protein, 119 aa, Artificial Sequence
  Description of Artificial Sequence: Synthetic polypeptide
EVQLLESGGGLVQPGGSLRLSCAASGFTFSNYAMGWVRQAPGKGLEWCAISSSSATTNYADSVKGRFTISRDNSKNTLYLQMNSLRAEDTAVYYCAREHVDWNSYFVLWGQGTLVTVSS

SEQ ID NO: 765 - protein, 107 aa, Artificial Sequence
  Description of Artificial Sequence: Synthetic polypeptide
EIVMTQSPATLSVSPGERATLSCRASQSVRSNLVWYQQKPGQAPRLLIYSASIRATGIPARFSGSGSGTEFTLTISSLQSEDFAVYYCQQYIRWPPTFGQGTKVEIK

SEQ ID NO: 766 - protein, 9 aa, Artificial Sequence
  Description of Artificial Sequence: Synthetic peptide
YSFTSYYMH

SEQ ID NO: 767 - protein, 119 aa, Artificial Sequence
  Description of Artificial Sequence: Synthetic polypeptide
EVQLLESGGGLVQPGGSLRLSCAASGFTFTSYTMSWVRQAPGKGLEWSSITSSGGGTSYADSVKGRFTISRDNSKNTLYLQMNSLRAEDTAVYYCARERVDWNKYFDLWGQGTLVTVSS

SEQ ID NO: 768 - protein, 107 aa, Artificial Sequence
  Description of Artificial Sequence: Synthetic polypeptide
EIVMTQSPATLSVSPGERATLSCRASQSVSDKLAWYQQKPGQAPRLLIYEASTRATGIPARFSGSGSGTEFTLTISSLQSEDFAVYYCQQFYTWPWTFGQGTKVEIK

SEQ ID NO: 769 - protein, 119 aa, Artificial Sequence
  Description of Artificial Sequence: Synthetic polypeptide
EVQLLESGGGLVQPGGSLRLSCAASGLTFSSYAMNWVRQAPGKGLEWSGISGSGGNTHYADSVKGRFTISRDNSKNTLYLQMNSLRAEDTAVYYCARERVDWNSYFDLEGQGTLVTVSS

SEQ ID NO: 770 - protein, 107 aa, Artificial Sequence
  Description of Artificial Sequence: Synthetic polypeptide
EIVMTQSPATLSVSPGERATLSCRASQSGAGNLAWYQQKPGQAPRLLIYDGSTRATGIPARFSGSGSGTEFTLTISSLQSEDFAVYYCQQYNHWPPTFGQGTKVEIK

SEQ ID NO: 771 - protein, 119 aa, Artificial Sequence
  Description of Artificial Sequence: Synthetic polypeptide
EVQLLESGGGLVQPGGSLRLSCAASGFTLSSYGMSWVRQAPGKGLEWSGISGSGVNTYYADSVKGRFTISRDNSKNTLYLQMNSLRAEDTAVYYCARERVDWNSYDDLWGQGTLVTVSS

SEQ ID NO: 772 - protein, 107 aa, Artificial Sequence
  Description of Artificial Sequence: Synthetic polypeptide
EIVMTQSPATLSVSPGERATLSCRASQSVFSNLAWYQQKPGQAPRLLIYSASTRATGIPARFSGSGSGTEFTLTISSLQSEDFAVYYCQQYSTWPQTFGQGTKVEIK

SEQ ID NO: 773 - protein, 119 aa, Artificial Sequence
  Description of Artificial Sequence: Synthetic polypeptide
EVQLLESGGGLVQPGGSLRLSCAASGFSFSTYAMAWVRQAPGKGLEWASITGSGGLISYADSVKGRFTISRDNSKNTLYLQMNSLRAEDTAVYYCARERDDWNSYFDLWGQGTLVTVSS

SEQ ID NO: 774 - protein, 107 aa, Artificial Sequence
  Description of Artificial Sequence: Synthetic polypeptide
EIVMTQSPATLSVSPGERATLSCRASQSVSNTLAWYQQKPGQAPRLLIYASSTRATGIPARFSGSGSGTEFTLTISSLQSEDFAVYYCQQYTTWPYTFGQGTKVEIK

SEQ ID NO: 775 - protein, 119 aa, Artificial Sequence
  Description of Artificial Sequence: Synthetic polypeptide
EVQLLESGGGLVQPGGSLRLSCAASGFTFSTYVMTWVRQAPGKGLEWSGISSSGGSTYYADSVKGRFTISRDNSKNTLYLQMNSLRAEDTAVYYCAREHVDWNSYFDLWGQGTLVTVSS

SEQ ID NO: 776 - protein, 107 aa, Artificial Sequence
  Description of Artificial Sequence: Synthetic polypeptide
EIVMTQSPATLSVSPGERATLSCRASQSVSTYLAWYQQKPGQAPRLLIYGASFRATGIPARFSGSGSGTEFTLTISSLQSEDFAVYYCQQYTTWPQTFGQGTKVEIK

SEQ ID NO: 777 - protein, 119 aa, Artificial Sequence
  Description of Artificial Sequence: Synthetic polypeptide
EVQLLESGGGLVQPGGSLRLSCAASGFTFSIYAMSWVRQAPGKGLEWAAISSSSGRTYYADSVKGRFTISRDNSKNTLYLQMNSLRAEDTAVYYCARERVDWNSWFDLWGQGTLVTVSS

SEQ ID NO: 778 - protein, 107 aa, Artificial Sequence
  Description of Artificial Sequence: Synthetic polypeptide
EIVMTQSPATLSVSPGERATLSCRTSQSISSNLAWYQQKPGQAPRLLIYASSTRATGIPARFSGSGSGTEFTLTISSLQSEDFAVYYCQQYSEWPPTFGQGTKVEIK

SEQ ID NO: 779 - protein, 119 aa, Artificial Sequence
  Description of Artificial Sequence: Synthetic polypeptide
EVQLLESGGGLVQPGGSLRLSCAASGFTFSTYAMSWVRQAPGKGLEWSAISGSGGSTSYADSVKGRFTISRDNSKNTLYLQMNSLRAEDTAVYYCASERVDWNSYFDLWGQGTLVTVSS

SEQ ID NO: 780 - protein, 107 aa, Artificial Sequence
  Description of Artificial Sequence: Synthetic polypeptide
EIVMTQSPATLSVSPGERATLSCTASQSVSSNLAWYQQKPGQAPRLLIYTASIRATGIPARFSGSGSGTEFTLTISSLQSEDFAVYYCQQYYSWPKTFGQGTKVEIK

SEQ ID NO: 781 - protein, 119 aa, Artificial Sequence
  Description of Artificial Sequence: Synthetic polypeptide
EVQLLESGGGLVQPGGSLRLSCAASGFIFSNYGMSWVRQAPGKGLEWSSISGGGGSTYYADSVKGRFTISRDNSKNTLYLQMNSLRAEDTAVYYCARERVTWNSYFDLWGQGTLVTVSS

SEQ ID NO: 782 - protein, 107 aa, Artificial Sequence
  Description of Artificial Sequence: Synthetic polypeptide
EIVMTQSPATLSVSPGERATLSCRASQSVRGNLAWYQQKPGQAPRLLIYGASRRATGIPARFSGSGSGTEFTLTISSLQSEDFAVYYCQQYYRWPLTFGQGTKVEIK

SEQ ID NO: 783 - protein, 119 aa, Artificial Sequence
  Description of Artificial Sequence: Synthetic polypeptide
EVQLLESGGGLVQPGGSLRLSCAASGFAFNNYAMSWVRQAPGKGLEWSGISGSGGTTYYADSVKGRFTISRDNSKNTLYLQMNSLRAEDTAVYYNARERVDWNSYFDLWGQGTLVTVSS

SEQ ID NO: 784 - protein, 107 aa, Artificial Sequence
  Description of Artificial Sequence: Synthetic polypeptide
EIVMTQSPATLSVSPGERATLSCRASQSVRSSLSWYQQKPGQAPRLLIYTASIRATGIPARFSGSGSGTEFTLTISSLQSEDFAVYYCQQYKNYPLTFGQGTKVEIK

SEQ ID NO: 785 - protein, 119 aa, Artificial Sequence
  Description of Artificial Sequence: Synthetic polypeptide
EVQLLESGGGLVQPGGSLRLSCAASGFTFNNYAMNWVRQAPGKGLEWSAVSGSGASTYYADSVKGRFTISRDNSKNTLYLQMNSLRAEDTAVYYCHRERVDWNSYFDLWGQGTLVTVSS

SEQ ID NO: 786 - protein, 107 aa, Artificial Sequence
  Description of Artificial Sequence: Synthetic polypeptide
EIVMTQSPATLSVSPGERATLSCRASQSVSSNLAWYQQKPGQAPRLLIYGSFTRATGIPARFSGSGSGTEFTLTISSLQSEDFAVYYCQQYSNWPPLFGQGTKVEIK

SEQ ID NO: 787 - protein, 119 aa, Artificial Sequence
  Description of Artificial Sequence: Synthetic polypeptide
EVQLLESGGGLVQPGGSLRLSCAASGFTFGDYAMSWVRQAPGKGLEWATVSSASALIYYADSVKGRFTISRDNSKNTLYLQMNSLRAEDTAVYYCKRERVDWNSYFDLWGQGTLVTVSS

SEQ ID NO: 788 - protein, 107 aa, Artificial Sequence
  Description of Artificial Sequence: Synthetic polypeptide
EIVMTQSPATLSVSPGERATLSCRASQSVSNTLAWYQQKPGQAPRLLIYDATTRATGIPARFSGSGSGTEFTLTISSLQSEDFAVYYCQQYYDWPITFGQGTKVEIK

SEQ ID NO: 789 - protein, 119 aa, Artificial Sequence
  Description of Artificial Sequence: Synthetic polypeptide
EVQLLESGGGLVQPGGSLRLSCAASGFTFSNYVMTWVRQAPGKGLEWSGISGSGTNTYYADSVKGRFTISRDNSKNTLYLQMNSLRAEDTAVYYCARERVDWNSQFDLWGQGTLVTVSS

SEQ ID NO: 790 - protein, 107 aa, Artificial Sequence
  Description of Artificial Sequence: Synthetic polypeptide
EIVMTQSPATLSVSPGERATLSCRASQSVNDNLAWYQQKPGQAPRLLIYAASTRVTGIPARFSGSGSGTEFTLTISSLQSEDFAVYYCQQYERWPPTFGQGTKVEIK

SEQ ID NO: 791 - protein, 119 aa, Artificial Sequence
  Description of Artificial Sequence: Synthetic polypeptide
EVQLLESGGGLVQPGGSLRLSCAASGLTFSSYAMSWVRQAPGKGLEWASITGSGSGTFYADSVKGRFTISRDNSKNTLYLQMNSLRAEDTAVYYCARERVDWNSYFDDWGQGTLVTVSS

SEQ ID NO: 792 - protein, 107 aa, Artificial Sequence
  Description of Artificial Sequence: Synthetic polypeptide
EIVMTQSPATLSVSPGERATLSCRASQSVSSNVAWYQQKPGQAPRLLIYGGSTRATGIPARFSGSGSGTEFTLTISSLQSEDFAVYYCQQYHLWPPTFGQGTKVEIK

SEQ ID NO: 793 - protein, 119 aa, Artificial Sequence
  Description of Artificial Sequence: Synthetic polypeptide
EVQLLESGGGLVQPGGSLRLSCAASGFTFSTYATSWVRQAPGKGLEWSAVSGSGASTYYADSVKGRFTISRDNSKNTLYLQMNSLRAEDTAVYYCRRERVDWNSYFDLWGQGTLVTVSS

SEQ ID NO: 794 - protein, 107 aa, Artificial Sequence
  Description of Artificial Sequence: Synthetic polypeptide
EIVMTQSPATLSVSPGERATLSCRASRSVSTNLAWYQQKPGQAPRLLIYGTSSRATGIPARFSGSGSGTEFTLTISSLQSEDFAVYYCQQYERWPPTFGQGTKVEIK

SEQ ID NO: 795 - protein, 119 aa, Artificial Sequence
  Description of Artificial Sequence: Synthetic polypeptide
EVQLLESGGGLVQPGGSLRLSCAASGFTFSSYGMNWVRQAPGKGLEWSGISGSGGNTFYADSVKGRFTISRDNSKNTLYLQMNSLRAEDTAVYYCAEERVDWNSYFDLWGQGTLVTVSS

SEQ ID NO: 796 - protein, 107 aa, Artificial Sequence
  Description of Artificial Sequence: Synthetic polypeptide
EIVMTQSPATLSVSPGERATLSCRASHSVSSKLAWYQQKPGQAPRLLIYEASTRATGIPARFSGSGSGTEFTLTISSLQSEDFAVYYCQQYYHWPRTFGQGTKVEIK

SEQ ID NO: 797 - protein, 119 aa, Artificial Sequence
  Description of Artificial Sequence: Synthetic polypeptide
EVQLLESGGGLVQPGGSLRLSCAASGFTFSNYVMSWVRQAPGKGLEWSAISGSGRSTYYADSVKGRFTISRDNSKNTLYLQMNSLRAEDTAVYYCARERVDNNSYFDLWGQGTLVTVSS

SEQ ID NO: 798 - protein, 107 aa, Artificial Sequence
  Description of Artificial Sequence: Synthetic polypeptide
EIVMTQSPATLSVSPGERATLSCRASQSVRDNLAWYQQKPGQAPRLLIYDASTRVTGIPARFSGSGSGTEFTLTISSLQSEDFAVYYCQQYNHWPPTFGQGTKVEIK

SEQ ID NO: 799 - protein, 119 aa, Artificial Sequence
  Description of Artificial Sequence: Synthetic polypeptide
EVQLLESGGGLVQPGGSLRLSCAASGFTFTTYALSWVRQAPGKGLEWSAISGSGGSTYSADSVKGRFTISRDNSKNTLYLQMNSLRAEDTAVYYWARERVDWNSYFDLWGQGTLVTVSS

SEQ ID NO: 800 - protein, 107 aa, Artificial Sequence
  Description of Artificial Sequence: Synthetic polypeptide
EIVMTQSPATLSVSPGERATLSCRASQSVSSYLAWYQQKPGQAPRLLIYRASTRAAGIPARFSGSGSGTEFTLTISSLQSEDFAVYYCQQYSDWPPTFGQGTKVEIK

SEQ ID NO: 801 - protein, 119 aa, Artificial Sequence
  Description of Artificial Sequence: Synthetic polypeptide
EVQLLESGGGLVQPGGSLRLSCAASGFAFSSSAMSWVRQAPGKGLEWSALSGSGGSTYSADSVKGRFTISRDNSKNTLYLQMNSLRAEDTAVYYCARERVDWNSYFDLWGQGTLVTVSS

SEQ ID NO: 802 - protein, 107 aa, Artificial Sequence
  Description of Artificial Sequence: Synthetic polypeptide
EIVMTQSPATLSVSPGERATLSCRASQSISTKLAWYQQKPGQAPRLLIYAASTRATGIPARFSGSGSGTEFTLTISSLQSEDFAVYYCHQYYTWPYTFGQGTKVEIK

SEQ ID NO: 803 - protein, 119 aa, Artificial Sequence
  Description of Artificial Sequence: Synthetic polypeptide
EVQLLESGGGLVQPGGSLRLSCAASGFIFTDYAMSWVRQAPGKGLEWSAITGSGGTTYYADSVKGRFTISRDNSKNTLYLQMNSLRAEDTAVYYCAREGVDWNSYFDLWGQGTLVTVSS

SEQ ID NO: 804 - protein, 107 aa, Artificial Sequence
  Description of Artificial Sequence: Synthetic polypeptide
EIVMTQSPATLSVSPGERATLSCRASESVRSNLAWYQQKPGQAPRLLIYDASTRTTGIPARFSGSGSGTEFTLTISSLQSEDFAVYYCQQYKTLPHTFGQGTKVEIK

SEQ ID NO: 805 - protein, 119 aa, Artificial Sequence
  Description of Artificial Sequence: Synthetic polypeptide
EVQLLESGGGLVQPGGSLRLSCAASGFTFSSYAMTWVRQAPGKGLEWSTISGSGRSTYYADSVKGRFTISRDNSKNTLYLQMNSLRAEDTAVYYCTRERVDWNSYFDLWGQGTLVTVSS

SEQ ID NO: 806 - protein, 107 aa, Artificial Sequence
  Description of Artificial Sequence: Synthetic polypeptide
EIVMTQSPATLSVSPGERATLSCRASQSVSSRLAWYQQKPGQAPRLLIYGASTSATGIPARFSGSGSGTEFTLTISSLQSEDFAVYYCQHYYNWPPTFGQGTKVEIK

SEQ ID NO: 807 - protein, 120 aa, Artificial Sequence
  Description of Artificial Sequence: Synthetic polypeptide
EVQLLESGGGLVQPGGSLRLSCAASGFTFDDYAMHWVRQAPGKGLEWVASITSSSAFIDYADSVKGRFTISRDNSKNTLYLQMNSLRAEDTAVYYCARERRDWNSYFDLWGQGTLVTVSS

SEQ ID NO: 808 - protein, 107 aa, Artificial Sequence
  Description of Artificial Sequence: Synthetic polypeptide
EIVMTQSPATLSVSPGERATLSCRASQSISSNLAWYQQKPGQAPRLLIYDASTTATGIPARFSGSGSGTEFTLTISSLQSEDFAVYYCQQYHLWPPTFGQGTKVEIK

SEQ ID NO: 809 - protein, 119 aa, Artificial Sequence
  Description of Artificial Sequence: Synthetic polypeptide
EVQLLESGGGLVQPGGSLRLSCAASGFTFNNYAMSWVRQAPGKGLEWSTITSSGASTFYADSVKGRFTISRDNSKNTLYLQMNSLRAEDTAVYYCARERVDKNSYFDLWGQGTLVTVSS

SEQ ID NO: 810 - protein, 107 aa, Artificial Sequence
  Description of Artificial Sequence: Synthetic polypeptide
EIVMTQSPATLSVSPGERATLSCRASQSVNDNLAWYQQKPGQAPRLLIYAASTRVTGIPARFSGSGSGTEFTLTISSLQSEDFAVYYCQQYKTWPLTFGQGTKVEIK

SEQ ID NO: 811 - protein, 119 aa, Artificial Sequence
  Description of Artificial Sequence: Synthetic polypeptide
EVQLLESGGGLVQPGGSLRLSCAASGLTFSSSAMSWVRQAPGKGLEWSAIRGSGGSTYYADSVKGRFTISRDNSKNTLYLQMNSLRAEDTAVYYCTRERVDWNSYFDLWGQGTLVTVSS

SEQ ID NO: 812 - protein, 107 aa, Artificial Sequence
  Description of Artificial Sequence: Synthetic polypeptide
EIVMTQSPATLSVSPGERATLSCRTSQSVSSNLAWYQQKPGQAPRLLIYGISTRATGIPARFSGSGSGTEFTLTISSLQSEDFAVYYCQQYKTWPWTFGQGTKVEIK

SEQ ID NO: 813 - protein, 119 aa, Artificial Sequence
  Description of Artificial Sequence: Synthetic polypeptide
EVQLLESGGGLVQPGGSLRLSCAASGFIFSNYGMSWVRQAPGKGLEWSTISSSGAFTYYADSVKGRFTISRDNSKNTLYLQMNSLRAEDTAVYYNARERVDWNSYFDLWGQGTLVTVSS

SEQ ID NO: 814 - protein, 107 aa, Artificial Sequence
  Description of Artificial Sequence: Synthetic polypeptide
EIVMTQSPATLSVSPGERATLSCRASQSVRGNLAWYQQKPGQAPRLLIYGASTRANGIPARFSGSGSGTEFTLTISSLQSEDFAVYYCQQYYRWPPTFGQGTKVEIK

SEQ ID NO: 815 - protein, 119 aa, Artificial Sequence
  Description of Artificial Sequence: Synthetic polypeptide
EVQLLESGGGLVQPGGSLRLSCAASGFTFSSYAMSWVRQAPGKGLEWSSISGSSGSIFYADSVKGRFTISRDNSKNTLYLQMNSLRAEDTAVYYCARERVDWNSYFDEWGQGTLVTVSS

SEQ ID NO: 816 - protein, 107 aa, Artificial Sequence
  Description of Artificial Sequence: Synthetic polypeptide
EIVMTQSPATLSVSPGERATLSCRASQSISSYLAWYQQKPGQAPRLLIYAASNRATGIPARFSGSGSGTEFTLTISSLQSEDFAVYYCQQYSTWPQTFGQGTKVEIK

SEQ ID NO: 817 - protein, 119 aa, Artificial Sequence
  Description of Artificial Sequence: Synthetic polypeptide
EVQLLESGGGLVQPGGSLRLSCAASGFSFSTYAMSWVRQAPGKGLEWSGISGSGGNTHYADSVKGRFTISRDNSKNTLYLQMNSLRAEDTAVYYCARERVDWNSNFDLWGQGTLVTVSS

SEQ ID NO: 818 - protein, 107 aa, Artificial Sequence
  Description of Artificial Sequence: Synthetic polypeptide
EIVMTQSPATLSVSPGERATLSCRASQSVSSNVAWYQQKPGQAPRLLIYGASTRATGIPARFSGSGSGTEFTLTISSLQSEDFAVYYCQQYYDYPRTFGQGTKVEIK

SEQ ID NO: 819 - protein, 119 aa, Artificial Sequence
  Description of Artificial Sequence: Synthetic polypeptide
EVQLLESGGGLVQPGGSLRLSCAASGFTSSSYAMGWVRQAPGKGLEWASISYSGGSTDYADSVKGRFTISRDNSKNTLYLQMNSLRAEDTAVYYCARERVDWNSYFGLWGQGTLVTVSS

SEQ ID NO: 820 - protein, 107 aa, Artificial Sequence
  Description of Artificial Sequence: Synthetic polypeptide
EIVMTQSPATLSVSPGERATLSCRASQSVSDKLAWYQQKPGQAPRLLIYGASSRAAGIPARFSGSGSGTEFTLTISSLQSEDFAVYYCQQYYDWPPTFGQGTKVEIK

SEQ ID NO: 821 - protein, 119 aa, Artificial Sequence
  Description of Artificial Sequence: Synthetic polypeptide
EVQLLESGGGLVQPGGSLRLSCAASGFIFRNYAMSWVRQAPGKGLEWSAITGSGGTTDYADSVKGRFTISRDNSKNTLYLQMNSLRAEDTAVYYCARERVDWYSYFDLWGQGTLVTVSS

SEQ ID NO: 822 - protein, 107 aa, Artificial Sequence
  Description of Artificial Sequence: Synthetic polypeptide
EIVMTQSPATLSVSPGERATLSCRASHSVSSNLAWYQQKPGQAPRLLIYGAATRATGIPARFSGSGSGTEFTLTISSLQSEDFAVYYCQQYNNRPPTFGQGTKVEIK

SEQ ID NO: 823 - protein, 119 aa, Artificial Sequence
  Description of Artificial Sequence: Synthetic polypeptide
EVQLLESGGGLVQPGGSLRLSCAASGFTFNFYAMSWVRQAPGKGLEWAAISSSSGRTYYADSVKGRFTISRDNSKNTLYLQMNSLRAEDTAVYYCAREDVDWNSYFDLWGQGTLVTVSS

SEQ ID NO: 824 - protein, 107 aa, Artificial Sequence
  Description of Artificial Sequence: Synthetic polypeptide
EIVMTQSPATLSVSPGERATLSCTASQSVSSNLAWYQQKPGQAPRLLIYDATTRATGIPARFSGSGSGTEFTLTISSLQSEDFAVYYCQQYTTWPPTFGQGTKVEIK

SEQ ID NO: 825 - protein, 119 aa, Artificial Sequence
  Description of Artificial Sequence: Synthetic polypeptide
EVQLLESGGGLVQPGGSLRLSCAASGFTFGNYAMTWVRQAPGKGLEWSTITSSGGSTDYADSVKGRFTISRDNSKNTLYLQMNSLRAEDTAVYYCARERVDENSYFDLWGQGTLVTVSS

SEQ ID NO: 826 - protein, 107 aa, Artificial Sequence
  Description of Artificial Sequence: Synthetic polypeptide
EIVMTQSPATLSVSPGERATLSCRASQSISTSLAWYQQKPGQAPRLLIYGASTRAGGIPARFSGSGSGTEFTLTISSLQSEDFAVYYCQQYDDWPPTFGQGTKVEIK

SEQ ID NO: 827 - protein, 119 aa, Artificial Sequence
  Description of Artificial Sequence: Synthetic polypeptide
EVQLLESGGGLVQPGGSLRLSCAASGFTLSNYAMSWVRQAPGKGLEWSAISGSGGRTYYADSVKGRFTISRDNSKNTLYLQMNSLRAEDTAVYYCARERVDWNSYNDLWGQGTLVTVSS

SEQ ID NO: 828 - protein, 107 aa, Artificial Sequence
  Description of Artificial Sequence: Synthetic polypeptide
EIVMTQSPATLSVSPGERATLSCRASQSVSSNVAWYQQKPGQAPRLLIYDASSRATGIPARFSGSGSGTEFTLTISSLQSEDFAVYYCQQYKTLPHTFGQGTKVEIK

SEQ ID NO: 829 - protein, 119 aa, Artificial Sequence
  Description of Artificial Sequence: Synthetic polypeptide
EVQLLESGGGLVQPGGSLRLSCAASGFTFSTYAMIWVRQAPGKGLEWSAISSSGGSIDYADSVKGRFTISRDNSKNTLYLQMNSLRAEDTAVYYCARERVDANSYFDLWGQGTLVTVSS

SEQ ID NO: 830 - protein, 107 aa, Artificial Sequence
  Description of Artificial Sequence: Synthetic polypeptide
EIVMTQSPATLSVSPGERATLSCRASQSISGNLAWYQQKPGQAPRLLIYDASTRAAGIPARFSGSGSGTEFTLTISSLQSEDFAVYYCQQYHNWPPTFGQGTKVEIK

SEQ ID NO: 831 - protein, 119 aa, Artificial Sequence
  Description of Artificial Sequence: Synthetic polypeptide
EVQLLESGGGLVQPGGSLRLSCAASGFSFSNYAMTWVRQAPGKGLEWSTITSSGGSTDYADSVKGRFTISRDNSKNTLYLQMNSLRAEDTAVYYCARERVDWNSYFDLWGQGTLVTVSS

SEQ ID NO: 832 - protein, 107 aa, Artificial Sequence
  Description of Artificial Sequence: Synthetic polypeptide
EIVMTQSPATLSVSPGERATLSCRASQSVSRNLAWYQQKPGQAPRLLIYSASARATGIPARFSGSGSGTEFTLTISSLQSEDFAVYYCQQYKTLPHTFGQGTKVEIK

SEQ ID NO: 833 - protein, 119 aa, Artificial Sequence
  Description of Artificial Sequence: Synthetic polypeptide
EVQLLESGGGLVQPGGSLRLSCAASGFTLRNYAMSWVRQAPGKGLEWSGISGSGGSPYYADSVKGRFTISRDNSKNTLYLQMNSLRAEDTAVYYCARSRVDWNSYFQLWGQGTLVTVSS

SEQ ID NO: 834 - protein, 107 aa, Artificial Sequence
  Description of Artificial Sequence: Synthetic polypeptide
EIVMTQSPATLSVSPGERATLSCRASQSVGNNLAWYQQKPGQAPRLLIYDASNRATGIPARFSGSGSGTEFTLTISSLQSEDFAVYYCQQYDDWPPTFGQGTKVEIK

SEQ ID NO: 835 - protein, 119 aa, Artificial Sequence
  Description of Artificial Sequence: Synthetic polypeptide
EVQLLESGGGLVQPGGSLRLSCAASGFTFSSFGMSWVRQAPGKGLEWSAISGGGGTTYYADSVKGRFTISRDNSKNTLYLQMNSLRAEDTAVYYCARERVDWKSYFDLWGQGTLVTVSS

SEQ ID NO: 836 - protein, 107 aa, Artificial Sequence
  Description of Artificial Sequence: Synthetic polypeptide
EIVMTQSPATLSVSPGERATLSCRASQSVGSNLAWYQQKPGQAPRLLIYDTSSRATGIPARFSGSGSGTEFTLTISSLQSEDFAVYYCQQYKTWPFTFGQGTKVEIK

SEQ ID NO: 837 - protein, 119 aa, Artificial Sequence
  Description of Artificial Sequence: Synthetic polypeptide
EVQLLESGGGLVQPGGSLRLSCAASGFTFTTYAMTWVRQAPGKGLEWSTISGSGGSTYYVDSVKGRFTISRDNSKNTLYLQMNSLRAEDTAVYYCARVRVDWNSYFDLWGQGTLVTVSS

SEQ ID NO: 838 - protein, 107 aa, Artificial Sequence
  Description of Artificial Sequence: Synthetic polypeptide
EIVMTQSPATLSVSPGERATLSCRASQSIGTNLAWYQQKPGQAPRLLIYSASSRATGIPARFSGSGSGTEFTLTISSLQSEDFAVYYCQQYYHWPQTFGQGTKVEIK

SEQ ID NO: 839 - protein, 119 aa, Artificial Sequence
  Description of Artificial Sequence: Synthetic polypeptide
EVQLLESGGGLVQPGGSLRLSCAASGFTFGSFAMSWVRQAPGKGLEWSVISGSGGSTHYADSVKGRFTISRDNSKNTLYLQMNSLRAEDTAVYYCARERVDWNSYFDLWGQGTLVTVSS

SEQ ID NO: 840 - protein, 107 aa, Artificial Sequence
  Description of Artificial Sequence: Synthetic polypeptide
EIVMTQSPATLSVSPGERATLSCRASQSVSTYLAWYQQKPGQAPRLLIYGASNRATGIPARFSGSGSGTEFTLTISSLQSEDFAVYYCQQYDTWPYTFGQGTKVEIK

SEQ ID NO: 841 - protein, 119 aa, Artificial Sequence
  Description of Artificial Sequence: Synthetic polypeptide
EVQLLESGGGLVQPGGSLRLSCAASGFTFTDYAMNWVRQAPGKGLEWSTISGSGATTYYADSVKGRFTISRDNSKNTLYLQMNSLRAEDTAVYYCAREDVDWNSYFDLWGQGTLVTVSS

SEQ ID NO: 842 - protein, 119 aa, Artificial Sequence
  Description of Artificial Sequence: Synthetic polypeptide
EVQLLESGGGLVQPGGSLRLSCAASGFTFSSYAMNWVRQAPGKGLEWSSISGSGGGTYYADSVKGRFTISRDNSKNTLYLQMNSLRAEDTAVYYCARERMDWNSYFDLWGQGTLVTVSS

SEQ ID NO: 843 - protein, 107 aa, Artificial Sequence
  Description of Artificial Sequence: Synthetic polypeptide
EIVMTQSPATLSVSPGERATLSCRASQSVSTDLAWYQQKPGQAPRLLIYAASTRVTGIPARFSGSGSGTEFTLTISSLQSEDFAVYYCQQYNTAPLTFGQGTKVEIK

SEQ ID NO: 844 - protein, 119 aa, Artificial Sequence
  Description of Artificial Sequence: Synthetic polypeptide
EVQLLESGGGLVQPGGSLRLSCAASGFSFGSYAMSWVRQAPGKGLEWSTISGSGAGTYYADSVKGRFTISRDNSKNTLYLQMNSLRAEDTAVYYCARERVDWNSYIDLWGQGTLVTVSS

SEQ ID NO: 845 - protein, 107 aa, Artificial Sequence
  Description of Artificial Sequence: Synthetic polypeptide
EIVMTQSPATLSVSPGERATLSCRASQSISGNLAWYQQKPGQAPRLLIYGAATRATGIPARFSGSGSGTEFTLTISSLQSEDFAVYYCQQYYKWPITFGQGTKVEIK

SEQ ID NO: 846 - protein, 119 aa, Artificial Sequence
  Description of Artificial Sequence: Synthetic polypeptide
EVQLLESGGGLVQPGGSLRLSCAASGFTFSSFPMSWVRQAPGKDLEWSSISGSGASIYYADSVKGRFTISRDNSKNTLYLQMNSLRAEDTAVYYCAREEVDWNSYFDLWGQGTLVTVSS

SEQ ID NO: 847 - protein, 107 aa, Artificial Sequence
  Description of Artificial Sequence: Synthetic polypeptide
EIVMTQSPATLSVSPGERATLSCRASQSVNNNLAWYQQKPGQAPRLLIYDASTRAIGIPARFSGSGSGTEFTLTISSLQSEDFAVYYCQQYDTWPPTFGQGTKVEIK

SEQ ID NO: 848 - protein, 107 aa, Artificial Sequence
  Description of Artificial Sequence: Synthetic polypeptide
EIVMTQSPATLSVSPGERATLSCRASQSVGTDLAWYQQKPGQAPRLLIYGASTRAAGIPARFSGSGSGTEFTLTISSLQSEDFAVYYCQQYYTYPPTFGQGTKVEIK

SEQ ID NO: 849 - protein, 119 aa, Artificial Sequence
  Description of Artificial Sequence: Synthetic polypeptide
EVQLLESGGGLVQPGGSLRLSCAASGFIFSDYAMSWVRQAPGKGLEWSGISGSSGTIYYADSVKGRFTISRDNSKNTLYLQMNSLRAEDTAVYYCAYERVDWNSYFDLWGQGTLVTVSS

SEQ ID NO: 850 - protein, 107 aa, Artificial Sequence
  Description of Artificial Sequence: Synthetic polypeptide
EIVMTQSPATLSVSPGERATLSCRASQSVDTNLAWYQQKPGQAPRLLIYAASIRATGIPARFSGSGSGTEFTLTISSLQSEDFAVYYCQQYKTLPHTFGQGTKVEIK

SEQ ID NO: 851 - protein, 119 aa, Artificial Sequence
  Description of Artificial Sequence: Synthetic polypeptide
EVQLLESGGGLVQPGGSLRLSCAASGFTFGSYAMSWVRQAPGKGLEWSTISGSGGSTHYADSVKGRFTISRDNSKNTLYLQMNSLRAEDTAVYYCARERVDWGSYFDLWGQGTLVTVSS

SEQ ID NO: 852 - protein, 107 aa, Artificial Sequence
  Description of Artificial Sequence: Synthetic polypeptide
EIVMTQSPATLSVSPGERATLSCRASQSVGSDLAWYQQKPGQAPRLLIYGVSTRAAGIPARFSGSGSGTEFTLTISSLQSEDFAVYYCQQYYKWPPTFGQGTKVEIK

SEQ ID NO: 853 - protein, 108 aa, Artificial Sequence
  Description of Artificial Sequence: Synthetic polypeptide
EIVMTQSPATLSVSPGERATLSCRACQGISNSYLAWYQQKPGQAPRLLIYGASTRGTGIPARFSGSGSGTEFTLTISSLQSEDFAVYYCQQYYTYPPTFGQGTKVEIK

SEQ ID NO: 854 - protein, 119 aa, Artificial Sequence
  Description of Artificial Sequence: Synthetic polypeptide
EVQLLESGGGLVQPGGSLRLSCAASGFTFSSYAMSWVRQAPGKGLEWSAISGSSGSTYYADSVKGRFTISRDNSKNTLYLQMNSLRAEDTAVYYCARERMDWNSYFDLWGQGTLVTVSS

SEQ ID NO: 855 - protein, 107 aa, Artificial Sequence
  Description of Artificial Sequence: Synthetic polypeptide
EIVMTQSPATLSVSPGERATLSCRASQSIDTNLAWYQQKPGQAPRLLIYVASTRATGIPARFSGSGSGTEFTLTISSLQSEDFAVYYCQQYYSWPKTFGQGTKVEIK

SEQ ID NO: 856 - protein, 119 aa, Artificial Sequence
  Description of Artificial Sequence: Synthetic polypeptide
EVQLLESGGGLVQPGGSLRLSCAASGFTFDTYAMNWVRQAPGKGLEWSSITGSGVSTDYADSVKGRFTISRDNSKNTLYLQMNSLRAEDTAVYYCARESVDWNSYFDLWGQGTLVTVSS

SEQ ID NO: 857 - protein, 107 aa, Artificial Sequence
  Description of Artificial Sequence: Synthetic polypeptide
EIVMTQSPATLSVSPGERATLSCRASQSVSSNIAWYQQKPGQAPRLLIYDASIRATGIPARFSGSGSGTEFTLTISSLQSEDFAVYYCQQYNKWPPTFGQGTKVEIK

SEQ ID NO: 858 - protein, 119 aa, Artificial Sequence
  Description of Artificial Sequence: Synthetic polypeptide
EVQLLESGGGLVQPGGSLRLSCAASGFTFRTYAMSWVRQAPGKGLEWSIITGSGGSTYYADSVKGRFTISRDNSKNTLYLQMNSLRAEDTAVYYCAMERVDWNSYFDLWGQGTLVTVSS

SEQ ID NO: 859 - protein, 107 aa, Artificial Sequence
  Description of Artificial Sequence: Synthetic polypeptide
EIVMTQSPATLSVSPGERATLSCRASQSVSYKLAWYQQKPGQAPRLLIYAASIRDTGIPARFSGSGSGTEFTLTISSLQSEDFAVYYCQQYDTWPLTFGQGTKVEIK

SEQ ID NO: 860 - protein, 119 aa, Artificial Sequence
  Description of Artificial Sequence: Synthetic polypeptide
EVQLLESGGGLVQPGGSLRLSCAASGFTFSSYSMTWVRQAPGKGLEWSAISSSGGSIDYADSVKGRFTISRDNSKNTLYLQMNSLRAEDTAVYYCAREMVDWNSYFWLWGQGTLVTVSS

SEQ ID NO: 861 - protein, 107 aa, Artificial Sequence
  Description of Artificial Sequence: Synthetic polypeptide
EIVMTQSPATLSVSPGERATLSCRASESVSSNLAWYQQKPGQAPRLLIYDASTRATGIPARFSGSGSGTEFTLTISSLQSEDFAVYYCQQYTTWPYTFGQGTKVEIK

SEQ ID NO: 862 - protein, 119 aa, Artificial Sequence
  Description of Artificial Sequence: Synthetic polypeptide
EVQLLESGGGLVQPGGSLRLSCAASGFTFRSYAMNWVRQAPGKGLEWSVISGSGGSTYYADSVKGRFTISRDNSKNTLYLQMNSLRAEDTAVYYCARERVDWNSYFDLWGQGTLVTVSS

SEQ ID NO: 863 - protein, 107 aa, Artificial Sequence
  Description of Artificial Sequence: Synthetic polypeptide
EIVMTQSPATLSVSPGERATLSCRASQSVSTYLAWYQQKPGQAPRLLIYDASTTATGIPARFSGSGSGTEFTLTISSLQSEDFAVYYCQQYDTWPFTFGQGTKVEIK

SEQ ID NO: 864 - protein, 107 aa, Artificial Sequence
  Description of Artificial Sequence: Synthetic polypeptide
EIVMTQSPATLSVSPGERATLSCRASQSISSHLAWYQQKPGQAPRLLIYGASSRASGIPARFSGSGSGTEFTLTISSLQSEDFAVYYCQQYNIWPPTFGQGTKVEIK

SEQ ID NO: 865 - protein, 119 aa, Artificial Sequence
  Description of Artificial Sequence: Synthetic polypeptide
EVQLLESGGGLVQPGGSLRLSCAASGFTFSDYAMNWVRQAPGKGLEWSAISGTGGTTYYADSVKGRFTISRDNSKNTLYLQMNSLRAEDTAVYYCARERVDWNSWFDLWGQGTLVTVSS

SEQ ID NO: 866 - protein, 107 aa, Artificial Sequence
  Description of Artificial Sequence: Synthetic polypeptide
EIVMTQSPATLSVSPGERATLSCRASRSVSSNLAWYQQKPGQAPRLLIYGGSTRATGIPARFSGSGSGTEFTLTISSLQSEDFAVYYCQQYYVWPPTFGQGTKVEIK

SEQ ID NO: 867 - protein, 119 aa, Artificial Sequence
  Description of Artificial Sequence: Synthetic polypeptide
EVQLLESGGGLVQPGGSLRLSCAASGFSFSTYAMTWVRQAPGKGLEWSTISGSGVNTYYADSVKGRFTISRDNSKNTLYLQMNSLRAEDTAVYYCARERVDWNSEFDLWGQGTLVTVSS

SEQ ID NO: 868 - protein, 107 aa, Artificial Sequence
  Description of Artificial Sequence: Synthetic polypeptide
EIVMTQSPATLSVSPGERATLSCRAGQSVSNNLAWYQQKPGQAPRLLIYGASPRATGIPARFSGSGSGTEFTLTISSLQSEDFAVYYCQQYDTSPLTFGQGTKVEIK

SEQ ID NO: 869 - protein, 119 aa, Artificial Sequence
  Description of Artificial Sequence: Synthetic polypeptide
EVQLLESGGGLVQPGGSLRLSCAASGFSFGSYAMGWVRQAPGKGLEWSIISSSGAFTYYADSVKGRFTISRDNSKNTLYLQMNSLRAEDTAVYYCARERLDWNSYFDLWGQGTLVTVSS

SEQ ID NO: 870 - protein, 107 aa, Artificial Sequence
  Description of Artificial Sequence: Synthetic polypeptide
EIVMTQSPATLSVSPGERATLSCRASQSVTRNLAWYQQKPGQAPRLLIYGASSRAAGIPARFSGSGSGTEFTLTISSLQSEDFAVYYCQQYYNWPPTFGQGTKVEIK

SEQ ID NO: 871 - protein, 119 aa, Artificial Sequence
  Description of Artificial Sequence: Synthetic polypeptide
EVQLLESGGGLVQPGGSLRLSCAASGFSFSTYAMHWVRQAPGKGLEWSAISGGGGSTFYADSVKGRFTISRDNSKNTLYLQMNSLRAEDTAVYYCARERVDWNSTFDLWGQGTLVTVSS

SEQ ID NO: 872 - protein, 107 aa, Artificial Sequence
  Description of Artificial Sequence: Synthetic polypeptide
EIVMTQSPATLSVSPGERATLSCRASQSVTTNLAWYQQKPGQAPRLLIYGASTRANGIPARFSGSGSGTEFTLTISSLQSEDFAVYYCQQYHKWPPTFGQGTKVEIK

SEQ ID NO: 873 - protein, 120 aa, Artificial Sequence
  Description of Artificial Sequence: Synthetic polypeptide
EVQLLESGGGLVQPGGSLRLSCAASGFTFDDYAMHWVRQAPGKGLEWVASITSSSAFIDYADSVKGRFTISRDNSKNTLYLQMNSLRAEDTAVYYCAREPVLWNSYFDLWGQGTLVTVSS

SEQ ID NO: 874 - protein, 107 aa, Artificial Sequence
  Description of Artificial Sequence: Synthetic polypeptide
EIVMTQSPATLSVSPGERATLSCRACPSVSNNLVWYQQKPGQAPRLLIYDASTRATGIPARFSGSGSGTEFTLTISSLQSEDFAVYYCQQYSHWPPTFGQGTKVEIK

SEQ ID NO: 875 - protein, 108 aa, Artificial Sequence
  Description of Artificial Sequence: Synthetic polypeptide
EIVMTQSPATLSVSPGERATLSCRACPSVSNNYLVWYQQKPGQAPRLLIYDASTRATGIPARFSGSGSGTEFTLTISSLQSEDFAVYYCQQYSHWPPTFGQGTKVEIK

SEQ ID NO: 876 - protein, 108 aa, Artificial Sequence
  Description of Artificial Sequence: Synthetic polypeptide
EIVMTQSPATLSVSPGERATLSCRASQSVSNNYLVWYQQKPGQAPRLLIYDASTRATGIPARFSGSGSGTEFTLTISSLQSEDFAVYYCQQYSHWPPTFGQGTKVEIK

SEQ ID NO: 877 - protein, 119 aa, Artificial Sequence
  Description of Artificial Sequence: Synthetic polypeptide
EVQLLESGGGLVQPGGSLRLSCAASGFTFSTDAMSWVRQAPGKGLEWSAISGSGGSTYSADSVKGRFTISRDNSKNTLYLQMNSLRAEDTAVYYCARARVDWNSYNDLWGQGTLVTVSS

SEQ ID NO: 878 - protein, 107 aa, Artificial Sequence
  Description of Artificial Sequence: Synthetic polypeptide
EIVMTQSPATLSVSPGERATLSCRASQSVNNKLAWYQQKPGQAPRLLIYAASTRATGIPARFSGSGSGTEFTLTISSLQSEDFAVYYCQQYSTWPITFGQGTKVEIK

SEQ ID NO: 879 - protein, 119 aa, Artificial Sequence
  Description of Artificial Sequence: Synthetic polypeptide
EVQLLESGGGLVQPGGSLRLSCAASGFTFSNYAISWVRQAPGKGLEWSDISGSGGTTYYADSVKGRFTISRDNSKNTLYLQMNSLRAEDTAVYYCARERVDWNSYFDLWGQGTLVTVSS

SEQ ID NO: 880 - protein, 120 aa, Artificial Sequence
  Description of Artificial Sequence: Synthetic polypeptide
EVQLLESGGGLVQPGGSLRLSCAASGFTFDDYAMHWVRQAPGKGLEWVASITSSSAFIDYADSVKGRFTISRDNSKNTLYLQMNSLRAEDTAVYYCARERVDWMSYFDLWGQGTLVTVSS

SEQ ID NO: 881 - protein, 119 aa, Artificial Sequence
  Description of Artificial Sequence: Synthetic polypeptide
EVQLLESGGGLVQPGGSLRLSCAASGFTFSNYGMTWVRQAPGKGLEWSSIGGSGGSTYYADSVKGRFTISRDNSKNTLYLQMNSLRAEDTAVYYCARKRVDWISYFDLWGQGTLVTVSS

SEQ ID NO: 882 - protein, 107 aa, Artificial Sequence
  Description of Artificial Sequence: Synthetic polypeptide
EIVMTQSPATLSVSPGERATLSCRASQSVTSKLAWYQQKPGQAPRLLIYDASTGATGIPARFSGSGSGTEFTLTISSLQSEDFAVYYCQQYYDIPETFGQGTKVEIK

SEQ ID NO: 883 - protein, 15 aa, Artificial Sequence
  Description of Artificial Sequence: Synthetic peptide
CAREPVDWNSYFDLW

SEQ ID NO: 884 - protein, 15 aa, Artificial Sequence
  Description of Artificial Sequence: Synthetic peptide
CARERVDWNSYFDNW

SEQ ID NO: 885 - protein, 9 aa, Artificial Sequence
  Description of Artificial Sequence: Synthetic peptide
FTLDDYAMH

SEQ ID NO: 886 - protein, 11 aa, Artificial Sequence
  Description of Artificial Sequence: Synthetic peptide
RASQSVGSYLA

SEQ ID NO: 887 - protein, 7 aa, Artificial Sequence
  Description of Artificial Sequence: Synthetic peptide
DASTRVT

SEQ ID NO: 888 - protein, 15 aa, Artificial Sequence
  Description of Artificial Sequence: Synthetic peptide
CARERVLWNSYFDLW

SEQ ID NO: 889 - protein, 11 aa, Artificial Sequence
  Description of Artificial Sequence: Synthetic peptide
CQQYERWPPTF

SEQ ID NO: 890 - protein, 12 aa, Artificial Sequence
  Description of Artificial Sequence: Synthetic peptide
RACQGISNSYLA

SEQ ID NO: 891 - protein, 7 aa, Artificial Sequence
  Description of Artificial Sequence: Synthetic peptide
DASARAT

SEQ ID NO: 892 - protein, 11 aa, Artificial Sequence
  Description of Artificial Sequence: Synthetic peptide
CQQYYKYPPTF

SEQ ID NO: 893 - protein, 12 aa, Artificial Sequence
  Description of Artificial Sequence: Synthetic peptide
RASQGISNNYLA

SEQ ID NO: 894 - protein, 12 aa, Artificial Sequence
  Description of Artificial Sequence: Synthetic peptide
RACPGISNSYLA

SEQ ID NO: 895 - protein, 11 aa, Artificial Sequence
  Description of Artificial Sequence: Synthetic peptide
RASQNVNNNLA

SEQ ID NO: 896 - protein, 7 aa, Artificial Sequence
  Description of Artificial Sequence: Synthetic peptide
DATTRAT

SEQ ID NO: 897 - protein, 11 aa, Artificial Sequence
  Description of Artificial Sequence: Synthetic peptide
CQQYYHWPQTF

SEQ ID NO: 898 - protein, 12 aa, Artificial Sequence
  Description of Artificial Sequence: Synthetic peptide
RASQNVNNNYLA

SEQ ID NO: 899 - protein, 11 aa, Artificial Sequence
  Description of Artificial Sequence: Synthetic peptide
RASQGVNNNLA

SEQ ID NO: 900 - protein, 11 aa, Artificial Sequence
  Description of Artificial Sequence: Synthetic peptide
RASQNINNNLA

SEQ ID NO: 901 - protein, 11 aa, Artificial Sequence
  Description of Artificial Sequence: Synthetic peptide
RASQNVSNNLA

SEQ ID NO: 902 - protein, 11 aa, Artificial Sequence
  Description of Artificial Sequence: Synthetic peptide
RASQNVNNSLA

SEQ ID NO: 903 - protein, 7 aa, Artificial Sequence
  Description of Artificial Sequence: Synthetic peptide
GATTRAT

SEQ ID NO: 904 - protein, 7 aa, Artificial Sequence
  Description of Artificial Sequence: Synthetic peptide
DASTRAT

SEQ ID NO: 905 - protein, 11 aa, Artificial Sequence
  Description of Artificial Sequence: Synthetic peptide
CQQYYTWPQTF

SEQ ID NO: 906 - protein, 11 aa, Artificial Sequence
  Description of Artificial Sequence: Synthetic peptide
CQQYYHYPQTF

SEQ ID NO: 907 - protein, 11 aa, Artificial Sequence
  Description of Artificial Sequence: Synthetic peptide
CQQYYHWPPTF

SEQ ID NO: 908 - protein, 9 aa, Artificial Sequence
  Description of Artificial Sequence: Synthetic peptide
FIFDDYAMH

SEQ ID NO: 909 - protein, 15 aa, Artificial Sequence
  Description of Artificial Sequence: Synthetic peptide
CARERVDWFSYFDLW

SEQ ID NO: 910 - protein, 11 aa, Artificial Sequence
  Description of Artificial Sequence: Synthetic peptide
RASQSVSNNLV

SEQ ID NO: 911 - protein, 11 aa, Artificial Sequence
  Description of Artificial Sequence: Synthetic peptide
CQQYSHWPPTF

SEQ ID NO: 912 - protein, 11 aa, Artificial Sequence
  Description of Artificial Sequence: Synthetic peptide
RASQSVYSNLA

SEQ ID NO: 913 - protein, 7 aa, Artificial Sequence
  Description of Artificial Sequence: Synthetic peptide
RASTRAT

SEQ ID NO: 914 - protein, 11 aa, Artificial Sequence
  Description of Artificial Sequence: Synthetic peptide
CQQYHIWPPTF

SEQ ID NO: 915 - protein, 9 aa, Artificial Sequence
  Description of Artificial Sequence: Synthetic peptide
FAFSNFAMS

SEQ ID NO: 916 - protein, 12 aa, Artificial Sequence
  Description of Artificial Sequence: Synthetic peptide
TITSSGGSTDYA

SEQ ID NO: 917 - protein, 15 aa, Artificial Sequence
  Description of Artificial Sequence: Synthetic peptide
KARERVDWNSYFNLW

SEQ ID NO: 918 - protein, 11 aa, Artificial Sequence
  Description of Artificial Sequence: Synthetic peptide
RASQSVTSDLA

SEQ ID NO: 919 - protein, 7 aa, Artificial Sequence
  Description of Artificial Sequence: Synthetic peptide
DASSRAM

SEQ ID NO: 920 - protein, 11 aa, Artificial Sequence
  Description of Artificial Sequence: Synthetic peptide
CQQYSTWPPTF

SEQ ID NO: 921 - protein, 9 aa, Artificial Sequence
  Description of Artificial Sequence: Synthetic peptide
FTFSSFALS

SEQ ID NO: 922 - protein, 14 aa, Artificial Sequence
  Description of Artificial Sequence: Synthetic peptide
SISSSGSGGSTNYA

SEQ ID NO: 923 - protein, 15 aa, Artificial Sequence
  Description of Artificial Sequence: Synthetic peptide
CIRERVDWNSYFDLW

SEQ ID NO: 924 - protein, 11 aa, Artificial Sequence
  Description of Artificial Sequence: Synthetic peptide
RASQSVTRNLA

SEQ ID NO: 925 - protein, 7 aa, Artificial Sequence
  Description of Artificial Sequence: Synthetic peptide
GESTRAT

SEQ ID NO: 926 - protein, 11 aa, Artificial Sequence
  Description of Artificial Sequence: Synthetic peptide
CQQYYNWPPSF

SEQ ID NO: 927 - protein, 9 aa, Artificial Sequence
  Description of Artificial Sequence: Synthetic peptide
FTFNDYAMT

SEQ ID NO: 928 - protein, 12 aa, Artificial Sequence
  Description of Artificial Sequence: Synthetic peptide
SISSSGGSIDYA

SEQ ID NO: 929 - protein, 15 aa, Artificial Sequence
  Description of Artificial Sequence: Synthetic peptide
CAREKVDWNSYFDLW

SEQ ID NO: 930 - protein, 11 aa, Artificial Sequence
  Description of Artificial Sequence: Synthetic peptide
RASQSVSNTLA

SEQ ID NO: 931 - protein, 7 aa, Artificial Sequence
  Description of Artificial Sequence: Synthetic peptide
GTSNRAA

SEQ ID NO: 932 - protein, 11 aa, Artificial Sequence [sequence omitted]

SEQ ID NO: 933 - protein, 9 aa, Artificial Sequence
  Description of Artificial Sequence: Synthetic peptide
FTFSDYAMT

SEQ ID NO: 934 - protein, 12 aa, Artificial Sequence
  Description of Artificial Sequence: Synthetic peptide
AISTSGGSTYYV

SEQ ID NO: 935 - protein, 11 aa, Artificial Sequence
  Description of Artificial Sequence: Synthetic peptide
RASQSVISNLA

SEQ ID NO: 936 - protein, 7 aa, Artificial Sequence
  Description of Artificial Sequence: Synthetic peptide
GASTGAT

SEQ ID NO: 937 - protein, 11 aa, Artificial Sequence [sequence omitted]

SEQ ID NO: 938 - protein, 9 aa, Artificial Sequence
  Description of Artificial Sequence: Synthetic peptide
LTFSSHAMS

SEQ ID NO: 939 - protein, 12 aa, Artificial Sequence
  Description of Artificial Sequence: Synthetic peptide
AITGSGGNTYYA

SEQ ID NO: 940 - protein, 15 aa, Artificial Sequence
  Description of Artificial Sequence: Synthetic peptide
CARERSDWNSYFDLH

SEQ ID NO: 941 - protein, 11 aa, Artificial Sequence
  Description of Artificial Sequence: Synthetic peptide
RASQSVDNNLA

SEQ ID NO: 942 - protein, 7 aa, Artificial Sequence
  Description of Artificial Sequence: Synthetic peptide
GASTRDT

SEQ ID NO: 943 - protein, 11 aa, Artificial Sequence [sequence omitted]

SEQ ID NO: 944 - protein, 15 aa, Artificial Sequence
  Description of Artificial Sequence: Synthetic peptide
CARERVDWWSYFDLW

SEQ ID NO: 945 - protein, 11 aa, Artificial Sequence
  Description of Artificial Sequence: Synthetic peptide
RASQSISNNLA

SEQ ID NO: 946 - protein, 7 aa, Artificial Sequence
  Description of Artificial Sequence: Synthetic peptide
DVSTRAT

SEQ ID NO: 947 - protein, 11 aa, Artificial Sequence
  Description of Artificial Sequence: Synthetic peptide
CQQYSLWPPTF

SEQ ID NO: 948 - protein, 9 aa, Artificial Sequence
  Description of Artificial Sequence: Synthetic peptide
FTLSSYGMS

SEQ ID NO: 949 - protein, 12 aa, Artificial Sequence
  Description of Artificial Sequence: Synthetic peptide
SITGSGDTSYYA

SEQ ID NO: 950 - protein, 15 aa, Artificial Sequence
  Description of Artificial Sequence: Synthetic peptide
CARERVDWNSYFDRW

SEQ ID NO: 951 - protein, 11 aa, Artificial Sequence
  Description of Artificial Sequence: Synthetic peptide
RASRSISSNLA

SEQ ID NO: 952 - protein, 7 aa, Artificial Sequence
  Description of Artificial Sequence: Synthetic peptide
DAFTRAT

SEQ ID NO: 953 - protein, 11 aa, Artificial Sequence
  Description of Artificial Sequence: Synthetic peptide
CQQYDTWPETF

SEQ ID NO: 954 - protein, 9 aa, Artificial Sequence
  Description of Artificial Sequence: Synthetic peptide
FTFSTYVMT

SEQ ID NO: 955 - protein, 12 aa, Artificial Sequence
  Description of Artificial Sequence: Synthetic peptide
SISYSGGFIYYA

SEQ ID NO: 956 - protein, 15 aa, Artificial Sequence
  Description of Artificial Sequence: Synthetic peptide
CARERVMWNSYFDLW

SEQ ID NO: 957 - protein, 11 aa, Artificial Sequence
  Description of Artificial Sequence: Synthetic peptide
RASQSVSVNLA

SEQ ID NO: 958 - protein, 7 aa, Artificial Sequence
  Description of Artificial Sequence: Synthetic peptide
DVSIRAT

SEQ ID NO: 959 - protein, 11 aa, Artificial Sequence
  Description of Artificial Sequence: Synthetic peptide
CQQYTTWPPTF

SEQ ID NO: 960 - protein, 15 aa, Artificial Sequence
  Description of Artificial Sequence: Synthetic peptide
CNRERVDWNSYFDLW

SEQ ID NO: 961 - protein, 11 aa, Artificial Sequence
  Description of Artificial Sequence: Synthetic peptide
RASQSVNNYLA

SEQ ID NO: 962 - protein, 7 aa, Artificial Sequence
  Description of Artificial Sequence: Synthetic peptide
DTSSRAT

SEQ ID NO: 963 - protein, 11 aa, Artificial Sequence
  Description of Artificial Sequence: Synthetic peptide
CQQYHSWPPTF

SEQ ID NO: 964 - protein, 9 aa, Artificial Sequence
  Description of Artificial Sequence: Synthetic peptide
FIFSDYAMS

SEQ ID NO: 965 - protein, 12 aa, Artificial Sequence
  Description of Artificial Sequence: Synthetic peptide
AISGSGGSTYYT

SEQ ID NO: 966 - protein, 15 aa, Artificial Sequence
  Description of Artificial Sequence: Synthetic peptide
CAREMVDWNSYFDLW

SEQ ID NO: 967 - protein, 11 aa, Artificial Sequence
  Description of Artificial Sequence: Synthetic peptide
RASQSITTNLA

SEQ ID NO: 968 - protein, 7 aa, Artificial Sequence
  Description of Artificial Sequence: Synthetic peptide
SASTRAT

SEQ ID NO: 969 - protein, 11 aa, Artificial Sequence
  Description of Artificial Sequence: Synthetic peptide
CQQYYDWPFTF

SEQ ID NO: 970 - protein, 15 aa, Artificial Sequence
  Description of Artificial Sequence: Synthetic peptide
CAQERVDWNSYFDLW

SEQ ID NO: 971 - protein, 9 aa, Artificial Sequence
  Description of Artificial Sequence: Synthetic peptide
FTFRNYAMT

SEQ ID NO: 972 - protein, 12 aa, Artificial Sequence
  Description of Artificial Sequence: Synthetic peptide
SISSSGGSTYYA

SEQ ID NO: 973 - protein, 15 aa, Artificial Sequence
  Description of Artificial Sequence: Synthetic peptide
CARERVDYNSYFDLW

SEQ ID NO: 974 - protein, 11 aa, Artificial Sequence
  Description of Artificial Sequence: Synthetic peptide
RASQSIGNNLA

SEQ ID NO: 975 - protein, 11 aa, Artificial Sequence
  Description of Artificial Sequence: Synthetic peptide
CQQYKHWPPTF

SEQ ID NO: 976 - protein, 9 aa, Artificial Sequence
  Description of Artificial Sequence: Synthetic peptide
FTLRNYAMS

SEQ ID NO: 977 - protein, 14 aa, Artificial Sequence
  Description of Artificial Sequence: Synthetic peptide
MGIINPSGGSTSYA

SEQ ID NO: 978 - protein, 12 aa, Artificial Sequence
  Description of Artificial Sequence: Synthetic peptide
AISGSGGSTSYA

SEQ ID NO: 979 - protein, 15 aa, Artificial Sequence
  Description of Artificial Sequence: Synthetic peptide
CDRERVDWNSYFDLW

SEQ ID NO: 980 - protein, 11 aa, Artificial Sequence
  Description of Artificial Sequence: Synthetic peptide
RASQSVSNNVA

SEQ ID NO: 981 - protein, 7 aa, Artificial Sequence
  Description of Artificial Sequence: Synthetic peptide
ASSTRAT

SEQ ID NO: 982 - protein, 11 aa, Artificial Sequence [sequence omitted]

SEQ ID NO: 983 - protein, 9 aa, Artificial Sequence
  Description of Artificial Sequence: Synthetic peptide
FTFDTYAMN

SEQ ID NO: 984 - protein, 12 aa, Artificial Sequence
  Description of Artificial Sequence: Synthetic peptide
GISGSGGSPYYA

SEQ ID NO: 985 - protein, 11 aa, Artificial Sequence
  Description of Artificial Sequence: Synthetic peptide
RASQSFSSNLA

SEQ ID NO: 986 - protein, 7 aa, Artificial Sequence
  Description of Artificial Sequence: Synthetic peptide
GASTRST

SEQ ID NO: 987 - protein, 11 aa, Artificial Sequence [sequence omitted]

SEQ ID NO: 988 - protein, 9 aa, Artificial Sequence
  Description of Artificial Sequence: Synthetic peptide
FTFSDYALS

SEQ ID NO: 989 - protein, 12 aa, Artificial Sequence
  Description of Artificial Sequence: Synthetic peptide
TISGSGGNTYYA

SEQ ID NO: 990 - protein, 15 aa, Artificial Sequence
  Description of Artificial Sequence: Synthetic peptide
CERERVDWNSYFDLW

SEQ ID NO: 991 - protein, 11 aa, Artificial Sequence
  Description of Artificial Sequence: Synthetic peptide
RASQSIRNNLA

SEQ ID NO: 992 - protein, 7 aa, Artificial Sequence
  Description of Artificial Sequence: Synthetic peptide
DASSRAT

SEQ ID NO: 993 - protein, 11 aa, Artificial Sequence
  Description of Artificial Sequence: Synthetic peptide
CQQYYIWPLTF

SEQ ID NO: 994 - protein, 9 aa, Artificial Sequence
  Description of Artificial Sequence: Synthetic peptide
FTFSSSAMS

SEQ ID NO: 995 - protein, 15 aa, Artificial Sequence
  Description of Artificial Sequence: Synthetic peptide
CAREVVDWNSYFDLW

SEQ ID NO: 996 - protein, 11 aa, Artificial Sequence
  Description of Artificial Sequence: Synthetic peptide
RASQSISSDLA

SEQ ID NO: 997 - protein, 7 aa, Artificial Sequence
  Description of Artificial Sequence: Synthetic peptide
GASTTAT

SEQ ID NO: 998 - protein, 11 aa, Artificial Sequence [sequence omitted]

SEQ ID NO: 999 - protein, 9 aa, Artificial Sequence
  Description of Artificial Sequence: Synthetic peptide
FTFSTHAMT

SEQ ID NO: 1000 - protein, 12 aa, Artificial Sequence
  Description of Artificial Sequence: Synthetic peptide
TISGSGATTEYA

SEQ ID NO: 1001 - protein, 15 aa, Artificial Sequence
  Description of Artificial Sequence: Synthetic peptide
CARETVDWNSYFDLW

SEQ ID NO: 1002 - protein, 11 aa, Artificial Sequence
  Description of Artificial Sequence: Synthetic peptide
RASQSVSNDLA

SEQ ID NO: 1003 - protein, 11 aa, Artificial Sequence [sequence omitted]

SEQ ID NO: 1004 - protein, 9 aa, Artificial Sequence
  Description of Artificial Sequence: Synthetic peptide
FTFSNYPMT

SEQ ID NO: 1005 - protein, 12 aa, Artificial Sequence
  Description of Artificial Sequence: Synthetic peptide
SISWSGGSIDYD

SEQ ID NO: 1006 - protein, 15 aa, Artificial Sequence
  Description of Artificial Sequence: Synthetic peptide
CAREHVDWNSYFDLW

SEQ ID NO: 1007 - protein, 11 aa, Artificial Sequence
  Description of Artificial Sequence: Synthetic peptide
RASQNVRSNLA

SEQ ID NO: 1008 - protein, 7 aa, Artificial Sequence
  Description of Artificial Sequence: Synthetic peptide
DASTTAT

SEQ ID NO: 1009 - protein, 11 aa, Artificial Sequence [sequence omitted]

SEQ ID NO: 1010 - protein, 9 aa, Artificial Sequence
  Description of Artificial Sequence: Synthetic peptide
FTFRDYAMS

SEQ ID NO: 1011 - protein, 12 aa, Artificial Sequence
  Description of Artificial Sequence: Synthetic peptide
SISGSGGSIDYA

SEQ ID NO: 1012 - protein, 15 aa, Artificial Sequence
  Description of Artificial Sequence: Synthetic peptide
CARERVDWNSYFDAW

SEQ ID NO: 1013 - protein, 11 aa, Artificial Sequence
  Description of Artificial Sequence: Synthetic peptide
RASQSVSSLLA

SEQ ID NO: 1014 - protein, 7 aa, Artificial Sequence
  Description of Artificial Sequence: Synthetic peptide
AASTRAT

SEQ ID NO: 1015 - protein, 11 aa, Artificial Sequence
  Description of Artificial Sequence: Synthetic peptide
CQQYGTWPQTF

SEQ ID NO: 1016 - protein, 9 aa, Artificial Sequence
  Description of Artificial Sequence: Synthetic peptide
FTLSSYAMS

SEQ ID NO: 1017 - protein, 12 aa, Artificial Sequence
  Description of Artificial Sequence: Synthetic peptide
GISGSGGRTYYA

SEQ ID NO: 1018 - protein, 15 aa, Artificial Sequence
  Description of Artificial Sequence: Synthetic peptide
CARIRVDWNSYFDLW

SEQ ID NO: 1019 - protein, 9 aa, Artificial Sequence
  Description of Artificial Sequence: Synthetic peptide
FTFNNYAMN

SEQ ID NO: 1020 - protein, 12 aa, Artificial Sequence
  Description of Artificial Sequence: Synthetic peptide
AISGSGGRTHYA

SEQ ID NO: 1021 - protein, 15 aa, Artificial Sequence
  Description of Artificial Sequence: Synthetic peptide
CARERLDINSYFDLW

SEQ ID NO: 1022 - protein, 11 aa, Artificial Sequence
  Description of Artificial Sequence: Synthetic peptide
RASQTVSSNLA

SEQ ID NO: 1023 - protein, 11 aa, Artificial Sequence
  Description of Artificial Sequence: Synthetic peptide
CQQYGTWPLTF

SEQ ID NO: 1024 - protein, 15 aa, Artificial Sequence
  Description of Artificial Sequence: Synthetic peptide
CARERVDWLSYFDLW

SEQ ID NO: 1025 - protein, 11 aa, Artificial Sequence [sequence omitted]

SEQ ID NO: 1026 - protein, 9 aa, Artificial Sequence
  Description of Artificial Sequence: Synthetic peptide
LTFSSYAMN

SEQ ID NO: 1027 - protein, 12 aa, Artificial Sequence
  Description of Artificial Sequence: Synthetic peptide
AISGTGGSTYYA

SEQ ID NO: 1028 - protein, 15 aa, Artificial Sequence
  Description of Artificial Sequence: Synthetic peptide
CARERVDWNNYFDLW

SEQ ID NO: 1029 - protein, 7 aa, Artificial Sequence
  Description of Artificial Sequence: Synthetic peptide
YASTRAT

SEQ ID NO: 1030 - protein, 11 aa, Artificial Sequence
  Description of Artificial Sequence: Synthetic peptide
CQQYSDWPPTF

SEQ ID NO: 1031 - protein, 9 aa, Artificial Sequence
  Description of Artificial Sequence: Synthetic peptide
FTFTTYALS

SEQ ID NO: 1032 - protein, 12 aa, Artificial Sequence
  Description of Artificial Sequence: Synthetic peptide
AISGSGSNTYYA

SEQ ID NO: 1033 - protein, 15 aa, Artificial Sequence
  Description of Artificial Sequence: Synthetic peptide
CARERVDWNVYFDLW

SEQ ID NO: 1034 - protein, 11 aa, Artificial Sequence
  Description of Artificial Sequence: Synthetic peptide
RASQSVGTDLA

SEQ ID NO: 1035 - protein, 7 aa, Artificial Sequence
  Description of Artificial Sequence: Synthetic peptide
GASIRAI

SEQ ID NO: 1036 - protein, 11 aa, Artificial Sequence
  Description of Artificial Sequence: Synthetic peptide
CQQYYKWPETF

SEQ ID NO: 1037 - protein, 9 aa, Artificial Sequence
  Description of Artificial Sequence: Synthetic peptide
LTFSNYAMA

SEQ ID NO: 1038 - protein, 12 aa, Artificial Sequence
  Description of Artificial Sequence: Synthetic peptide
AISSSSGGTFYA

SEQ ID NO: 1039 - protein, 11 aa, Artificial Sequence
  Description of Artificial Sequence: Synthetic peptide
RASQSVSSNLA

SEQ ID NO: 1040 - protein, 11 aa, Artificial Sequence
  Description of Artificial Sequence: Synthetic peptide
CQQYYVWPDTF

SEQ ID NO: 1041 - protein, 9 aa, Artificial Sequence
  Description of Artificial Sequence: Synthetic peptide
FAFSNHAMN

SEQ ID NO: 1042 - protein, 12 aa, Artificial Sequence
  Description of Artificial Sequence: Synthetic peptide
AISSSGGSIDYA

SEQ ID NO: 1043 - protein, 15 aa, Artificial Sequence
  Description of Artificial Sequence: Synthetic peptide
CARERVIWNSYFDLW

SEQ ID NO: 1044 - protein, 11 aa, Artificial Sequence
  Description of Artificial Sequence: Synthetic peptide
RASQSVSTNFA

SEQ ID NO: 1045 - protein, 7 aa, Artificial Sequence
  Description of Artificial Sequence: Synthetic peptide
GASSRAT

SEQ ID NO: 1046 - protein, 11 aa, Artificial Sequence
  Description of Artificial Sequence: Synthetic peptide
CQQYYKWPPLF

SEQ ID NO: 1047 - protein, 9 aa, Artificial Sequence
  Description of Artificial Sequence: Synthetic peptide
FTFTNYAMT

SEQ ID NO: 1048 - protein, 12 aa, Artificial Sequence
  Description of Artificial Sequence: Synthetic peptide
SITGSGGNTDYA

SEQ ID NO: 1049 - protein, 15 aa, Artificial Sequence
  Description of Artificial Sequence: Synthetic peptide
CARERDDWNSYFDLW

SEQ ID NO: 1050 - protein, 11 aa, Artificial Sequence
  Description of Artificial Sequence: Synthetic peptide
RASQSVSRNLA

SEQ ID NO: 1051 - protein, 7 aa, Artificial Sequence
  Description of Artificial Sequence: Synthetic peptide
GASSRVT

SEQ ID NO: 1052 - protein, 11 aa, Artificial Sequence
  Description of Artificial Sequence: Synthetic peptide
CQQYKTLPHTF

SEQ ID NO: 1053 - protein, 9 aa, Artificial Sequence
  Description of Artificial Sequence: Synthetic peptide
FTFTSYAMN

SEQ ID NO: 1054 - protein, 12 aa, Artificial Sequence
  Description of Artificial Sequence: Synthetic peptide
AISGSGGSTDYA

SEQ ID NO: 1055 - protein, 15 aa, Artificial Sequence
  Description of Artificial Sequence: Synthetic peptide
FARERVDWNSYFDLW

SEQ ID NO: 1056 - protein, 11 aa, Artificial Sequence
  Description of Artificial Sequence: Synthetic peptide
RASQSVGTNLA

SEQ ID NO: 1057 - protein, 11 aa, Artificial Sequence
  Description of Artificial Sequence: Synthetic peptide
CQQYYDIPETF

SEQ ID NO: 1058 - protein, 9 aa, Artificial Sequence
  Description of Artificial Sequence: Synthetic peptide
FAFSTYAMS

SEQ ID NO: 1059 - protein, 12 aa, Artificial Sequence
  Description of Artificial Sequence: Synthetic peptide
AISGSGGSTYHA

SEQ ID NO: 1060 - protein, 15 aa, Artificial Sequence
  Description of Artificial Sequence: Synthetic peptide
CARERVDWNSYNDLW

SEQ ID NO: 1061 - protein, 11 aa, Artificial Sequence
  Description of Artificial Sequence: Synthetic peptide
RASQSVSSYLA

SEQ ID NO: 1062 - protein, 7 aa, Artificial Sequence
  Description of Artificial Sequence: Synthetic peptide
GASTWAT

SEQ ID NO: 1063 - protein, 11 aa, Artificial Sequence
  Description of Artificial Sequence: Synthetic peptide
CQQYTTWPRTF

SEQ ID NO: 1064 - protein, 9 aa, Artificial Sequence
  Description of Artificial Sequence: Synthetic peptide
FTFSNYAMD

SEQ ID NO: 1065 - protein, 12 aa, Artificial Sequence
  Description of Artificial Sequence: Synthetic peptide
GIGGSGGSTYYA

SEQ ID NO: 1066 - protein, 15 aa, Artificial Sequence
  Description of Artificial Sequence: Synthetic peptide
CARERVDWNSYFYLW

SEQ ID NO: 1067 - protein, 11 aa, Artificial Sequence
  Description of Artificial Sequence: Synthetic peptide
RASQTVGSNLA

SEQ ID NO: 1068 - protein, 7 aa, Artificial Sequence
  Description of Artificial Sequence: Synthetic peptide
AASNRAT

SEQ ID NO: 1069 - protein, 11 aa, Artificial Sequence
  Description of Artificial Sequence: Synthetic peptide
CQQYKIWPPTF

SEQ ID NO: 1070 - protein, 9 aa, Artificial Sequence
  Description of Artificial Sequence: Synthetic peptide
FTFSNFAMN

SEQ ID NO: 1071 - protein, 12 aa, Artificial Sequence
  Description of Artificial Sequence: Synthetic peptide
VITGSGGSTYYA

SEQ ID NO: 1072 - protein, 11 aa, Artificial Sequence
  Description of Artificial Sequence: Synthetic peptide
RASQSVTSKLA

SEQ ID NO: 1073 - protein, 7 aa, Artificial Sequence
  Description of Artificial Sequence: Synthetic peptide
SASTRAA

SEQ ID NO: 1074 - protein, 9 aa, Artificial Sequence
  Description of Artificial Sequence: Synthetic peptide
FTFSNYAMH

SEQ ID NO: 1075 - protein, 12 aa, Artificial Sequence
  Description of Artificial Sequence: Synthetic peptide
AISTSGGSTYYA

SEQ ID NO: 1076 - protein, 15 aa, Artificial Sequence
  Description of Artificial Sequence: Synthetic peptide
CALERADWNSYFDLW

SEQ ID NO: 1077 - protein, 11 aa, Artificial Sequence
  Description of Artificial Sequence: Synthetic peptide
RASQSVKSNLA

SEQ ID NO: 1078 - protein, 7 aa, Artificial Sequence
  Description of Artificial Sequence: Synthetic peptide
AASSRAT

SEQ ID NO: 1079 - protein, 9 aa, Artificial Sequence
  Description of Artificial Sequence: Synthetic peptide
FSFSIYAMS

SEQ ID NO: 1080 - protein, 12 aa, Artificial Sequence
  Description of Artificial Sequence: Synthetic peptide
AISGSGTSTYYA

SEQ ID NO: 1081 - protein, 15 aa, Artificial Sequence
  Description of Artificial Sequence: Synthetic peptide
CWRERVDWNSYFDLW

SEQ ID NO: 1082 - protein, 11 aa, Artificial Sequence
  Description of Artificial Sequence: Synthetic peptide
RASQSIGSSLA

SEQ ID NO: 1083 - protein, 7 aa, Artificial Sequence
  Description of Artificial Sequence: Synthetic peptide
DTSIRAT

SEQ ID NO: 1084 - protein, 9 aa, Artificial Sequence
  Description of Artificial Sequence: Synthetic peptide
FSFSGYAMS

SEQ ID NO: 1085 - protein, 12 aa, Artificial Sequence
  Description of Artificial Sequence: Synthetic peptide
SITSSGGSTYYA

SEQ ID NO: 1086 - protein, 11 aa, Artificial Sequence
  Description of Artificial Sequence: Synthetic peptide
RASQSITSNLA

SEQ ID NO: 1087 - protein, 7 aa, Artificial Sequence
  Description of Artificial Sequence: Synthetic peptide
GTSSRAT

SEQ ID NO: 1088 - protein, 9 aa, Artificial Sequence
  Description of Artificial Sequence: Synthetic peptide
FTFSRYGMS

SEQ ID NO: 1089 - protein, 15 aa, Artificial Sequence
  Description of Artificial Sequence: Synthetic peptide
HARERVDWNSYFDLW

SEQ ID NO: 1090 - protein, 11 aa, Artificial Sequence
  Description of Artificial Sequence: Synthetic peptide
RASQSISDNLA

SEQ ID NO: 1091 - protein, 7 aa, Artificial Sequence
  Description of Artificial Sequence: Synthetic peptide
DASTRAP

SEQ ID NO: 1092 - protein, 11 aa, Artificial Sequence
  Description of Artificial Sequence: Synthetic peptide
CQQYDIWPPTF

SEQ ID NO: 1093 - protein, 12 aa, Artificial Sequence
  Description of Artificial Sequence: Synthetic peptide
TISGSGVNTYYA

SEQ ID NO: 1094 - protein, 15 aa, Artificial Sequence
  Description of Artificial Sequence: Synthetic peptide
CARERVDWNSYFDLL

SEQ ID NO: 1095 - protein, 11 aa, Artificial Sequence
  Description of Artificial Sequence: Synthetic peptide
RASQSLSTNLA

SEQ ID NO: 1096 - protein, 7 aa, Artificial Sequence
  Description of Artificial Sequence: Synthetic peptide
RASIRAT

SEQ ID NO: 1097 - protein, 9 aa, Artificial Sequence
  Description of Artificial Sequence: Synthetic peptide
FAFSNYAMS

SEQ ID NO: 1098 - protein, 12 aa, Artificial Sequence
  Description of Artificial Sequence: Synthetic peptide
SISSSGGSTDYA

SEQ ID NO: 1099 - protein, 15 aa, Artificial Sequence
  Description of Artificial Sequence: Synthetic peptide
TARERVDWNSYFDLW

SEQ ID NO: 1100 - protein, 11 aa, Artificial Sequence
  Description of Artificial Sequence: Synthetic peptide
RASQSVSSDLV

SEQ ID NO: 1101 - protein, 11 aa, Artificial Sequence
  Description of Artificial Sequence: Synthetic peptide
CQQYYSWPKTF

SEQ ID NO: 1102 - protein, 9 aa, Artificial Sequence
  Description of Artificial Sequence: Synthetic peptide
FTFSNYAMG

SEQ ID NO: 1103 - protein, 12 aa, Artificial Sequence
  Description of Artificial Sequence: Synthetic peptide
AISSSSATTNYA

SEQ ID NO: 1104 - protein, 15 aa, Artificial Sequence
  Description of Artificial Sequence: Synthetic peptide
CAREHVDWNSYFVLW

SEQ ID NO: 1105 - protein, 11 aa, Artificial Sequence
  Description of Artificial Sequence: Synthetic peptide
RASQSVRSNLV

SEQ ID NO: 1106 - protein, 7 aa, Artificial Sequence
  Description of Artificial Sequence: Synthetic peptide
SASIRAT

SEQ ID NO: 1107 - protein, 11 aa, Artificial Sequence
  Description of Artificial Sequence: Synthetic peptide
CQQYIRWPPTF

SEQ ID NO: 1108 - protein, 9 aa, Artificial Sequence
  Description of Artificial Sequence: Synthetic peptide
FTFTSYTMS

SEQ ID NO: 1109 - protein, 12 aa, Artificial Sequence
  Description of Artificial Sequence: Synthetic peptide
SITSSGGGTSYA

SEQ ID NO: 1110 - protein, 15 aa, Artificial Sequence
  Description of Artificial Sequence: Synthetic peptide
CARERVDWNKYFDLW

SEQ ID NO: 1111 - protein, 11 aa, Artificial Sequence
  Description of Artificial Sequence: Synthetic peptide
RASQSVSDKLA

SEQ ID NO: 1112 - protein, 7 aa, Artificial Sequence
  Description of Artificial Sequence: Synthetic peptide
EASTRAT

SEQ ID NO: 1113 - protein, 11 aa, Artificial Sequence
  Description of Artificial Sequence: Synthetic peptide
CQQFYTWPWTF

SEQ ID NO: 1114 - protein, 12 aa, Artificial Sequence
  Description of Artificial Sequence: Synthetic peptide
GISGSGGNTHYA

SEQ ID NO: 1115 - protein, 15 aa, Artificial Sequence
  Description of Artificial Sequence: Synthetic peptide
CARERVDWNSYFDLE

SEQ ID NO: 1116 - protein, 11 aa, Artificial Sequence
  Description of Artificial Sequence: Synthetic peptide
RASQSGAGNLA

SEQ ID NO: 1117 - protein, 7 aa, Artificial Sequence
  Description of Artificial Sequence: Synthetic peptide
DGSTRAT

SEQ ID NO: 1118 - protein, 12 aa, Artificial Sequence
  Description of Artificial Sequence: Synthetic peptide
GISGSGVNTYYA

SEQ ID NO: 1119 - protein, 15 aa, Artificial Sequence
  Description of Artificial Sequence: Synthetic peptide
CARERVDWNSYDDLW

SEQ ID NO: 1120 - protein, 11 aa, Artificial Sequence
  Description of Artificial Sequence: Synthetic peptide
RASQSVFSNLA

SEQ ID NO: 1121 - protein, 11 aa, Artificial Sequence
  Description of Artificial Sequence: Synthetic peptide
CQQYSTWPQTF

SEQ ID NO: 1122 - protein, 9 aa, Artificial Sequence
  Description of Artificial Sequence: Synthetic peptide
FSFSTYAMA

SEQ ID NO: 1123 - protein, 12 aa, Artificial Sequence
  Description of Artificial Sequence: Synthetic peptide
SITGSGGLISYA

SEQ ID NO: 1124 - protein, 11 aa, Artificial Sequence
  Description of Artificial Sequence: Synthetic peptide
CQQYTTWPYTF

SEQ ID NO: 1125 - protein, 12 aa, Artificial Sequence
  Description of Artificial Sequence: Synthetic peptide
GISSSGGSTYYA

SEQ ID NO: 1126 - protein, 11 aa, Artificial Sequence
  Description of Artificial Sequence: Synthetic peptide
RASQSVSTYLA

SEQ ID NO: 1127 - protein, 7 aa, Artificial Sequence
  Description of Artificial Sequence: Synthetic peptide
GASFRAT

SEQ ID NO: 1128 - protein, 11 aa, Artificial Sequence
  Description of Artificial Sequence: Synthetic peptide
CQQYTTWPQTF

SEQ ID NO: 1129 - protein, 9 aa, Artificial Sequence
  Description of Artificial Sequence: Synthetic peptide
FTFSIYAMS

SEQ ID NO: 1130 - protein, 12 aa, Artificial Sequence
  Description of Artificial Sequence: Synthetic peptide
AISSSSGRTYYA

SEQ ID NO: 1131 - protein, 15 aa, Artificial Sequence
  Description of Artificial Sequence: Synthetic peptide
CARERVDWNSWFDLW

SEQ ID NO: 1132 - protein, 11 aa, Artificial Sequence
  Description of Artificial Sequence: Synthetic peptide
RTSQSISSNLA

SEQ ID NO: 1133 - protein, 11 aa, Artificial Sequence
  Description of Artificial Sequence: Synthetic peptide
CQQYSEWPPTF

SEQ ID NO: 1134 - protein, 9 aa, Artificial Sequence
  Description of Artificial Sequence: Synthetic peptide
FTFSTYAMS

SEQ ID NO: 1135 - protein, 15 aa, Artificial Sequence
  Description of Artificial Sequence: Synthetic peptide
CASERVDWNSYFDLW

SEQ ID NO: 1136 - protein, 11 aa, Artificial Sequence
  Description of Artificial Sequence: Synthetic peptide
TASQSVSSNLA

SEQ ID NO: 1137 - protein, 7 aa, Artificial Sequence
  Description of Artificial Sequence: Synthetic peptide
TASIRAT

SEQ ID NO: 1138 - protein, 9 aa, Artificial Sequence
  Description of Artificial Sequence: Synthetic peptide
FIFSNYGMS

SEQ ID NO: 1139 - protein, 12 aa, Artificial Sequence
  Description of Artificial Sequence: Synthetic peptide
SISGGGGSTYYA

SEQ ID NO: 1140 - protein, 15 aa, Artificial Sequence
  Description of Artificial Sequence: Synthetic peptide
CARERVTWNSYFDLW

SEQ ID NO: 1141 - protein, 11 aa, Artificial Sequence
  Description of Artificial Sequence: Synthetic peptide
RASQSVRGNLA

SEQ ID NO: 1142 - protein, 7 aa, Artificial Sequence
  Description of Artificial Sequence: Synthetic peptide
GASRRAT

SEQ ID NO: 1143 - protein, 11 aa, Artificial Sequence [sequence omitted]

SEQ ID NO: 1144 - protein, 9 aa, Artificial Sequence
  Description of Artificial Sequence: Synthetic peptide
FAFNNYAMS

SEQ ID NO: 1145 - protein, 12 aa, Artificial Sequence
  Description of Artificial Sequence: Synthetic peptide
GISGSGGTTYYA

SEQ ID NO: 1146 - protein, 15 aa, Artificial Sequence
  Description of Artificial Sequence: Synthetic peptide
NARERVDWNSYFDLW

SEQ ID NO: 1147 - protein, 11 aa, Artificial Sequence
  Description of Artificial Sequence: Synthetic peptide
RASQSVRSSLS

SEQ ID NO: 1148 - protein, 11 aa, Artificial Sequence [sequence omitted]

SEQ ID NO: 1149 - protein, 12 aa, Artificial Sequence
  Description of Artificial Sequence: Synthetic peptide
AVSGSGASTYYA

SEQ ID NO: 1150 - protein, 15 aa, Artificial Sequence
  Description of Artificial Sequence: Synthetic peptide
CHRERVDWNSYFDLW

SEQ ID NO: 1151 - protein, 7 aa, Artificial Sequence
  Description of Artificial Sequence: Synthetic peptide
GSFTRAT

SEQ ID NO: 1152 - protein, 11 aa, Artificial Sequence [sequence omitted]

SEQ ID NO: 1153 - protein, 9 aa, Artificial Sequence
  Description of Artificial Sequence: Synthetic peptide
FTFGDYAMS

SEQ ID NO: 1154 - protein, 12 aa, Artificial Sequence
  Description of Artificial Sequence: Synthetic peptide
TVSSASALIYYA

SEQ ID NO: 1155 - protein, 15 aa, Artificial Sequence
  Description of Artificial Sequence: Synthetic peptide
CKRERVDWNSYFDLW

SEQ ID NO: 1156 - protein, 9 aa, Artificial Sequence
  Description of Artificial Sequence: Synthetic peptide
FTFSNYVMT

SEQ ID NO: 1157 - protein, 12 aa, Artificial Sequence
  Description of Artificial Sequence: Synthetic peptide
GISGSGTNTYYA

SEQ ID NO: 1158 - protein, 15 aa, Artificial Sequence
  Description of Artificial Sequence: Synthetic peptide
CARERVDWNSQFDLW

SEQ ID NO: 1159 - protein, 11 aa, Artificial Sequence
  Description of Artificial Sequence: Synthetic peptide
RASQSVNDNLA

SEQ ID NO: 1160 - protein, 7 aa, Artificial Sequence
  Description of Artificial Sequence: Synthetic peptide
AASTRVT

SEQ ID NO: 1161 - protein, 9 aa, Artificial Sequence
  Description of Artificial Sequence: Synthetic peptide
LTFSSYAMS

SEQ ID NO: 1162 - protein, 12 aa, Artificial Sequence
  Description of Artificial Sequence: Synthetic peptide
SITGSGSGTFYA

SEQ ID NO: 1163 - protein, 15 aa, Artificial Sequence
  Description of Artificial Sequence: Synthetic peptide
CARERVDWNSYFDDW

SEQ ID NO: 1164 - protein, 11 aa, Artificial Sequence
  Description of Artificial Sequence: Synthetic peptide
RASQSVSSNVA

SEQ ID NO: 1165 - protein, 7 aa, Artificial Sequence
  Description of Artificial Sequence: Synthetic peptide
GGSTRAT

SEQ ID NO: 1166 - protein, 11 aa, Artificial Sequence
  Description of Artificial Sequence: Synthetic peptide
CQQYHLWPPTF

SEQ ID NO: 1167 - protein, 9 aa, Artificial Sequence
  Description of Artificial Sequence: Synthetic peptide
FTFSTYATS

SEQ ID NO: 1168 - protein, 15 aa, Artificial Sequence
  Description of Artificial Sequence: Synthetic peptide
CRRERVDWNSYFDLW

SEQ ID NO: 1169 - protein, 11 aa, Artificial Sequence
  Description of Artificial Sequence: Synthetic peptide
RASRSVSTNLA

SEQ ID NO: 1170 - protein, 9 aa, Artificial Sequence
  Description of Artificial Sequence: Synthetic peptide
FTFSSYGMN

SEQ ID NO: 1171 - protein, 12 aa, Artificial Sequence
  Description of Artificial Sequence: Synthetic peptide
GISGSGGNTFYA

SEQ ID NO: 1172 - protein, 15 aa, Artificial Sequence
  Description of Artificial Sequence: Synthetic peptide
CAEERVDWNSYFDLW

SEQ ID NO: 1173 - protein, 11 aa, Artificial Sequence
  Description of Artificial Sequence: Synthetic peptide
RASHSVSSKLA

SEQ ID NO: 1174 - protein, 11 aa, Artificial Sequence [sequence omitted]

SEQ ID NO: 1175 - protein, 9 aa, Artificial Sequence
  Description of Artificial Sequence: Synthetic peptide
FTFSNYVMS

SEQ ID NO: 1176 - protein, 12 aa, Artificial Sequence
  Description of Artificial Sequence: Synthetic peptide
AISGSGRSTYYA

SEQ ID NO: 1177 - protein, 15 aa, Artificial Sequence
  Description of Artificial Sequence: Synthetic peptide
CARERVDNNSYFDLW

SEQ ID NO: 1178 - protein, 11 aa, Artificial Sequence
  Description of Artificial Sequence: Synthetic peptide
RASQSVRDNLA

SEQ ID NO: 1179 - protein, 12 aa, Artificial Sequence
  Description of Artificial Sequence: Synthetic peptide
AISGSGGSTYSA

SEQ ID NO: 1180 - protein, 15 aa, Artificial Sequence
  Description of Artificial Sequence: Synthetic peptide
WARERVDWNSYFDLW

SEQ ID NO: 1181 - protein, 7 aa, Artificial Sequence
  Description of Artificial Sequence: Synthetic peptide
RASTRAA

SEQ ID NO: 1182 - protein, 9 aa, Artificial Sequence
  Description of Artificial Sequence: Synthetic peptide
FAFSSSAMS

SEQ ID NO: 1183 - protein, 12 aa, Artificial Sequence
  Description of Artificial Sequence: Synthetic peptide
ALSGSGGSTYSA

SEQ ID NO: 1184 - protein, 11 aa, Artificial Sequence
  Description of Artificial Sequence: Synthetic peptide
RASQSISTKLA

SEQ ID NO: 1185 - protein, 11 aa, Artificial Sequence
  Description of Artificial Sequence: Synthetic peptide
CHQYYTWPYTF

SEQ ID NO: 1186 - protein, 9 aa, Artificial Sequence
  Description of Artificial Sequence: Synthetic peptide
FIFTDYAMS

SEQ ID NO: 1187 - protein, 12 aa, Artificial Sequence
  Description of Artificial Sequence: Synthetic peptide
AITGSGGTTYYA

SEQ ID NO: 1188 - protein, 15 aa, Artificial Sequence
  Description of Artificial Sequence: Synthetic peptide
CAREGVDWNSYFDLW

SEQ ID NO: 1189 - protein, 11 aa, Artificial Sequence
  Description of Artificial Sequence: Synthetic peptide
RASESVRSNLA

SEQ ID NO: 1190 - protein, 7 aa, Artificial Sequence
  Description of Artificial Sequence: Synthetic peptide
DASTRTT

SEQ ID NO: 1191 - protein, 9 aa, Artificial Sequence
  Description of Artificial Sequence: Synthetic peptide
FTFSSYAMT

SEQ ID NO: 1192 - protein, 12 aa, Artificial Sequence
  Description of Artificial Sequence: Synthetic peptide
TISGSGRSTYYA

SEQ ID NO: 1193 - protein, 15 aa, Artificial Sequence
  Description of Artificial Sequence: Synthetic peptide
CTRERVDWNSYFDLW

SEQ ID NO: 1194 - protein, 11 aa, Artificial Sequence
  Description of Artificial Sequence: Synthetic peptide
RASQSVSSRLA

SEQ ID NO: 1195 - protein, 7 aa, Artificial Sequence
  Description of Artificial Sequence: Synthetic peptide
GASTSAT

SEQ ID NO: 1196 - protein, 11 aa, Artificial Sequence
  Description of Artificial Sequence: Synthetic peptide
CQHYYNWPPTF

SEQ ID NO: 1197 - protein, 15 aa, Artificial Sequence
  Description of Artificial Sequence: Synthetic peptide
CARERRDWNSYFDLW

SEQ ID NO: 1198 - protein, 11 aa, Artificial Sequence
  Description of Artificial Sequence: Synthetic peptide
RASQSISSNLA

SEQ ID NO: 1199 - protein, 9 aa, Artificial Sequence
  Description of Artificial Sequence: Synthetic peptide
FTFNNYAMS

SEQ ID NO: 1200 - protein, 12 aa, Artificial Sequence
  Description of Artificial Sequence: Synthetic peptide
TITSSGASTFYA

SEQ ID NO: 1201 - protein, 15 aa, Artificial Sequence
  Description of Artificial Sequence: Synthetic peptide
CARERVDKNSYFDLW

SEQ ID NO: 1202 - protein, 11 aa, Artificial Sequence [sequence omitted]

SEQ ID NO: 1203 - protein, 9 aa, Artificial Sequence
  Description of Artificial Sequence: Synthetic peptide
LTFSSSAMS

SEQ ID NO: 1204 - protein, 12 aa, Artificial Sequence
  Description of Artificial Sequence: Synthetic peptide
AIRGSGGSTYYA

SEQ ID NO: 1205 - protein, 11 aa, Artificial Sequence
  Description of Artificial Sequence: Synthetic peptide
RTSQSVSSNLA

SEQ ID NO: 1206 - protein, 7 aa, Artificial Sequence
  Description of Artificial Sequence: Synthetic peptide
GISTRAT

SEQ ID NO: 1207 - protein, 11 aa, Artificial Sequence
  Description of Artificial Sequence: Synthetic peptide
CQQYKTWPWTF

SEQ ID NO: 1208 - protein, 12 aa, Artificial Sequence
  Description of Artificial Sequence: Synthetic peptide
TISSSGAFTYYA

SEQ ID NO: 1209 - protein, 7 aa, Artificial Sequence
  Description of Artificial Sequence: Synthetic peptide
GASTRAN

SEQ ID NO: 1210 - protein, 11 aa, Artificial Sequence [sequence omitted]

SEQ ID NO: 1211 - protein, 9 aa, Artificial Sequence
  Description of Artificial Sequence: Synthetic peptide
FTFSSYAMS

SEQ ID NO: 1212 - protein, 12 aa, Artificial Sequence
  Description of Artificial Sequence: Synthetic peptide
SISGSSGSIFYA

SEQ ID NO: 1213 - protein, 15 aa, Artificial Sequence
  Description of Artificial Sequence: Synthetic peptide
CARERVDWNSYFDEW

SEQ ID NO: 1214 - protein, 11 aa, Artificial Sequence
  Description of Artificial Sequence: Synthetic peptide
RASQSISSYLA

SEQ ID NO: 1215 - protein, 9 aa, Artificial Sequence
  Description of Artificial Sequence: Synthetic peptide
FSFSTYAMS

SEQ ID NO: 1216 - protein, 15 aa, Artificial Sequence
  Description of Artificial Sequence: Synthetic peptide
CARERVDWNSNFDLW

SEQ ID NO: 1217 - protein, 11 aa, Artificial Sequence [sequence omitted]

SEQ ID NO: 1218 - protein, 9 aa, Artificial Sequence
  Description of Artificial Sequence: Synthetic peptide
FTSSSYAMG

SEQ ID NO: 1219 - protein, 12 aa, Artificial Sequence
  Description of Artificial Sequence: Synthetic peptide
SISYSGGSTDYA

SEQ ID NO: 1220 - protein, 15 aa, Artificial Sequence
  Description of Artificial Sequence: Synthetic peptide
CARERVDWNSYFGLW

SEQ ID NO: 1221 - protein, 7 aa, Artificial Sequence
  Description of Artificial Sequence: Synthetic peptide
GASSRAA

SEQ ID NO: 1222 - protein, 11 aa, Artificial Sequence
  Description of Artificial Sequence: Synthetic peptide
CQQYYDWPPTF

SEQ ID NO: 1223 - protein, 9 aa, Artificial Sequence
  Description of Artificial Sequence: Synthetic peptide
FIFRNYAMS

SEQ ID NO: 1224 - protein, 12 aa, Artificial Sequence
  Description of Artificial Sequence: Synthetic peptide
AITGSGGTTDYA

SEQ ID NO: 1225 - protein, 15 aa, Artificial Sequence
  Description of Artificial Sequence: Synthetic peptide
CARERVDWYSYFDLW

SEQ ID NO: 1226 - protein, 11 aa, Artificial Sequence
  Description of Artificial Sequence: Synthetic peptide
RASHSVSSNLA

SEQ ID NO: 1227 - protein, 7 aa, Artificial Sequence
  Description of Artificial Sequence: Synthetic peptide
GAATRAT

SEQ ID NO: 1228 - protein, 9 aa, Artificial Sequence
  Description of Artificial Sequence: Synthetic peptide
FTFNFYAMS

SEQ ID NO: 1229 - protein, 15 aa, Artificial Sequence
  Description of Artificial Sequence: Synthetic peptide
CAREDVDWNSYFDLW

SEQ ID NO: 1230 - protein, 9 aa, Artificial Sequence
  Description of Artificial Sequence: Synthetic peptide
FTFGNYAMT

SEQ ID NO: 1231 - protein, 15 aa, Artificial Sequence
  Description of Artificial Sequence: Synthetic peptide
CARERVDENSYFDLW

SEQ ID NO: 1232 - protein, 11 aa, Artificial Sequence
  Description of Artificial Sequence: Synthetic peptide
RASQSISTSLA

SEQ ID NO: 1233 - protein, 7 aa, Artificial Sequence
  Description of Artificial Sequence: Synthetic peptide
GASTRAG

SEQ ID NO: 1234 - protein, 11 aa, Artificial Sequence [sequence omitted]

SEQ ID NO: 1235 - protein, 9 aa, Artificial Sequence
  Description of Artificial Sequence: Synthetic peptide
FTLSNYAMS

SEQ ID NO: 1236 - protein, 12 aa, Artificial Sequence
  Description of Artificial Sequence: Synthetic peptide
AISGSGGRTYYA

SEQ ID NO: 1237 - protein, 9 aa, Artificial Sequence
  Description of Artificial Sequence: Synthetic peptide
FTFSTYAMI

SEQ ID NO: 1238 - protein, 15 aa, Artificial Sequence
  Description of Artificial Sequence: Synthetic peptide
CARERVDANSYFDLW

SEQ ID NO: 1239 - protein, 11 aa, Artificial Sequence
  Description of Artificial Sequence: Synthetic peptide
RASQSISGNLA

SEQ ID NO: 1240 - protein, 7 aa, Artificial Sequence
  Description of Artificial Sequence: Synthetic peptide
DASTRAA

SEQ ID NO: 1241 - protein, 9 aa, Artificial Sequence
  Description of Artificial Sequence: Synthetic peptide
FSFSNYAMT

SEQ ID NO: 1242 - protein, 7 aa, Artificial Sequence
  Description of Artificial Sequence: Synthetic peptide
SASARAT

SEQ ID NO: 1243 - protein, 15 aa, Artificial Sequence
  Description of Artificial Sequence: Synthetic peptide
CARSRVDWNSYFQLW

SEQ ID NO: 1244 - protein, 11 aa, Artificial Sequence
  Description of Artificial Sequence: Synthetic peptide
RASQSVGNNLA

SEQ ID NO: 1245 - protein, 7 aa, Artificial Sequence
  Description of Artificial Sequence: Synthetic peptide
DASNRAT

SEQ ID NO: 1246 - protein, 9 aa, Artificial Sequence
  Description of Artificial Sequence: Synthetic peptide
FTFSSFGMS

SEQ ID NO: 1247 - protein, 12 aa, Artificial Sequence
  Description of Artificial Sequence: Synthetic peptide
AISGGGGTTYYA

SEQ ID NO: 1248 - protein, 15 aa, Artificial Sequence
  Description of Artificial Sequence: Synthetic peptide
CARERVDWKSYFDLW

SEQ ID NO: 1249 - protein, 11 aa, Artificial Sequence
  Description of Artificial Sequence: Synthetic peptide
RASQSVGSNLA

SEQ ID NO: 1250 - protein, 11 aa, Artificial Sequence
  Description of Artificial Sequence: Synthetic peptide
CQQYKTWPFTF

SEQ ID NO: 1251 - protein, 9 aa, Artificial Sequence
  Description of Artificial Sequence: Synthetic peptide
FTFTTYAMT

SEQ ID NO: 1252 - protein, 12 aa, Artificial Sequence
  Description of Artificial Sequence: Synthetic peptide
TISGSGGSTYYV

SEQ ID NO: 1253 - protein, 15 aa, Artificial Sequence
  Description of Artificial Sequence: Synthetic peptide
CARVRVDWNSYFDLW

SEQ ID NO: 1254 - protein, 11 aa, Artificial Sequence
  Description of Artificial Sequence: Synthetic peptide
RASQSIGTNLA

SEQ ID NO: 1255 - protein, 7 aa, Artificial Sequence
  Description of Artificial Sequence: Synthetic peptide
SASSRAT

SEQ ID NO: 1256 - protein, 9 aa, Artificial Sequence
  Description of Artificial Sequence: Synthetic peptide
FTFGSFAMS

SEQ ID NO: 1257 - protein, 12 aa, Artificial Sequence
  Description of Artificial Sequence: Synthetic peptide
VISGSGGSTHYA

SEQ ID NO: 1258 - protein, 7 aa, Artificial Sequence
  Description of Artificial Sequence: Synthetic peptide
GASNRAT

SEQ ID NO: 1259 - protein, 11 aa, Artificial Sequence [sequence omitted]

SEQ ID NO: 1260 - protein, 9 aa, Artificial Sequence
  Description of Artificial Sequence: Synthetic peptide
FTFTDYAMN

SEQ ID NO: 1261 - protein, 12 aa, Artificial Sequence
  Description of Artificial Sequence: Synthetic peptide
TISGSGATTYYA

SEQ ID NO: 1262 - protein, 11 aa, Artificial Sequence
  Description of Artificial Sequence: Synthetic peptide
RTSQSVSSDLA

SEQ ID NO: 1263 - protein, 7 aa, Artificial Sequence
  Description of Artificial Sequence: Synthetic peptide
GPSTRAT

SEQ ID NO: 1264 - protein, 11 aa, Artificial Sequence
  Description of Artificial Sequence: Synthetic peptide
CQQYKTWPQTF

SEQ ID NO: 1265 - protein, 9 aa, Artificial Sequence
  Description of Artificial Sequence: Synthetic peptide
FTFSSYAMN

SEQ ID NO: 1266 - protein, 12 aa, Artificial Sequence
  Description of Artificial Sequence: Synthetic peptide
SISGSGGGTYYA

SEQ ID NO: 1267 - protein, 15 aa, Artificial Sequence
  Description of Artificial Sequence: Synthetic peptide
CARERMDWNSYFDLW

SEQ ID NO: 1268 - protein, 11 aa, Artificial Sequence
  Description of Artificial Sequence: Synthetic peptide
RASQSVSTDLA

SEQ ID NO: 1269 - protein, 11 aa, Artificial Sequence
  Description of Artificial Sequence: Synthetic peptide
CQQYNTAPLTF

SEQ ID NO: 1270 - protein, 9 aa, Artificial Sequence
  Description of Artificial Sequence: Synthetic peptide
FSFGSYAMS

SEQ ID NO: 1271 - protein, 12 aa, Artificial Sequence
  Description of Artificial Sequence: Synthetic peptide
TISGSGAGTYYA

SEQ ID NO: 1272 - protein, 15 aa, Artificial Sequence
  Description of Artificial Sequence: Synthetic peptide
CARERVDWNSYIDLW

SEQ ID NO: 1273 - protein, 11 aa, Artificial Sequence
  Description of Artificial Sequence: Synthetic peptide
CQQYYKWPITF

SEQ ID NO: 1274 - protein, 9 aa, Artificial Sequence
  Description of Artificial Sequence: Synthetic peptide
FTFSSFPMS

SEQ ID NO: 1275 - protein, 12 aa, Artificial Sequence
  Description of Artificial Sequence: Synthetic peptide
SISGSGASIYYA

SEQ ID NO: 1276 - protein, 15 aa, Artificial Sequence
  Description of Artificial Sequence: Synthetic peptide
CAREEVDWNSYFDLW

SEQ ID NO: 1277 - protein, 11 aa, Artificial Sequence
  Description of Artificial Sequence: Synthetic peptide
RASQSVNNNLA

SEQ ID NO: 1278 - protein, 7 aa, Artificial Sequence
  Description of Artificial Sequence: Synthetic peptide
DASTRAI

SEQ ID NO: 1279 - protein, 11 aa, Artificial Sequence
  Description of Artificial Sequence: Synthetic peptide
CQQYDTWPPTF

SEQ ID NO: 1280 - protein, 7 aa, Artificial Sequence
  Description of Artificial Sequence: Synthetic peptide
GASTRAA

SEQ ID NO: 1281 - protein, 12 aa, Artificial Sequence
  Description of Artificial Sequence: Synthetic peptide
GISGSSGTIYYA

SEQ ID NO: 1282 - protein, 15 aa, Artificial Sequence
  Description of Artificial Sequence: Synthetic peptide
CAYERVDWNSYFDLW

SEQ ID NO: 1283 - protein, 11 aa, Artificial Sequence
  Description of Artificial Sequence: Synthetic peptide
RASQSVDTNLA

SEQ ID NO: 1284 - protein, 7 aa, Artificial Sequence
  Description of Artificial Sequence: Synthetic peptide
AASIRAT

SEQ ID NO: 1285 - protein, 9 aa, Artificial Sequence
  Description of Artificial Sequence: Synthetic peptide
FTFGSYAMS

SEQ ID NO: 1286 - protein, 12 aa, Artificial Sequence
  Description of Artificial Sequence: Synthetic peptide
TISGSGGSTHYA

SEQ ID NO: 1287 - protein, 15 aa, Artificial Sequence
  Description of Artificial Sequence: Synthetic peptide
CARERVDWGSYFDLW

SEQ ID NO: 1288 - protein, 11 aa, Artificial Sequence
  Description of Artificial Sequence: Synthetic peptide
RASQSVGSDLA

SEQ ID NO: 1289 - protein, 7 aa, Artificial Sequence
  Description of Artificial Sequence: Synthetic peptide
GVSTRAA

SEQ ID NO: 1290 - protein, 11 aa, Artificial Sequence [sequence omitted]

SEQ ID NO: 1291 - protein, 7 aa, Artificial Sequence
  Description of Artificial Sequence: Synthetic peptide
GASTRGT

SEQ ID NO: 1292 - protein, 12 aa, Artificial Sequence
  Description of Artificial Sequence: Synthetic peptide
AISGSSGSTYYA

SEQ ID NO: 1293 - protein, 11 aa, Artificial Sequence
  Description of Artificial Sequence: Synthetic peptide
RASQSIDTNLA

SEQ ID NO: 1294 - protein, 7 aa, Artificial Sequence
  Description of Artificial Sequence: Synthetic peptide
VASTRAT

SEQ ID NO: 1295 - protein, 12 aa, Artificial Sequence
  Description of Artificial Sequence: Synthetic peptide
SITGSGVSTDYA

SEQ ID NO: 1296 - protein, 15 aa, Artificial Sequence
  Description of Artificial Sequence: Synthetic peptide
CARESVDWNSYFDLW

SEQ ID NO: 1297 - protein, 11 aa, Artificial Sequence
  Description of Artificial Sequence: Synthetic peptide
RASQSVSSNIA

SEQ ID NO: 1298 - protein, 7 aa, Artificial Sequence
  Description of Artificial Sequence: Synthetic peptide
DASIRAT

SEQ ID NO: 1299 - protein, 11 aa, Artificial Sequence [sequence omitted]

SEQ ID NO: 1300 - protein, 9 aa, Artificial Sequence
  Description of Artificial Sequence: Synthetic peptide
FTFRTYAMS

SEQ ID NO: 1301 - protein, 12 aa, Artificial Sequence
  Description of Artificial Sequence: Synthetic peptide
IITGSGGSTYYA

SEQ ID NO: 1302 - protein, 15 aa, Artificial Sequence
  Description of Artificial Sequence: Synthetic peptide
CAMERVDWNSYFDLW

SEQ ID NO: 1303 - protein, 11 aa, Artificial Sequence
  Description of Artificial Sequence: Synthetic peptide
RASQSVSYKLA

SEQ ID NO: 1304 - protein, 7 aa, Artificial Sequence
  Description of Artificial Sequence: Synthetic peptide
AASIRDT

SEQ ID NO: 1305 - protein, 9 aa, Artificial Sequence
  Description of Artificial Sequence: Synthetic peptide
FTFSSYSMT

SEQ ID NO: 1306 - protein, 15 aa, Artificial Sequence
  Description of Artificial Sequence: Synthetic peptide
CAREMVDWNSYFWLW

SEQ ID NO: 1307 - protein, 11 aa, Artificial Sequence
  Description of Artificial Sequence: Synthetic peptide
RASESVSSNLA

SEQ ID NO: 1308 - protein, 9 aa, Artificial Sequence
  Description of Artificial Sequence: Synthetic peptide
FTFRSYAMN

SEQ ID NO: 1309 - protein, 12 aa, Artificial Sequence
  Description of Artificial Sequence: Synthetic peptide
VISGSGGSTYYA

SEQ ID NO: 1310 - protein, 11 aa, Artificial Sequence
  Description of Artificial Sequence: Synthetic peptide
CQQYDTWPFTF

SEQ ID NO: 1311 - protein, 11 aa, Artificial Sequence
  Description of Artificial Sequence: Synthetic peptide
RASQSISSHLA

SEQ ID NO: 1312 - protein, 7 aa, Artificial Sequence
  Description of Artificial Sequence: Synthetic peptide
GASSRAS

SEQ ID NO: 1313 - protein, 11 aa, Artificial Sequence [sequence omitted]

SEQ ID NO: 1314 - protein, 9 aa, Artificial Sequence
  Description of Artificial Sequence: Synthetic peptide
FTFSDYAMN

SEQ ID NO: 1315 - protein, 12 aa, Artificial Sequence
  Description of Artificial Sequence: Synthetic peptide
AISGTGGTTYYA

SEQ ID NO: 1316 - protein, 11 aa, Artificial Sequence
  Description of Artificial Sequence: Synthetic peptide
RASRSVSSNLA

SEQ ID NO: 1317 - protein, 11 aa, Artificial Sequence
  Description of Artificial Sequence: Synthetic peptide
CQQYYVWPPTF

SEQ ID NO: 1318 - protein, 9 aa, Artificial Sequence
  Description of Artificial Sequence: Synthetic peptide
FSFSTYAMT

SEQ ID NO: 1319 - protein, 15 aa, Artificial Sequence
  Description of Artificial Sequence: Synthetic peptide
CARERVDWNSEFDLW

SEQ ID NO: 1320 - protein, 11 aa, Artificial Sequence
  Description of Artificial Sequence: Synthetic peptide
RAGQSVSNNLA

SEQ ID NO: 1321 - protein, 7 aa, Artificial Sequence
  Description of Artificial Sequence: Synthetic peptide
GASPRAT

SEQ ID NO: 1322 - protein, 11 aa, Artificial Sequence [sequence omitted]

SEQ ID NO: 1323 - protein, 9 aa, Artificial Sequence
  Description of Artificial Sequence: Synthetic peptide
FSFGSYAMG

SEQ ID NO: 1324 - protein, 12 aa, Artificial Sequence
  Description of Artificial Sequence: Synthetic peptide
IISSSGAFTYYA

SEQ ID NO: 1325 - protein, 15 aa, Artificial Sequence
  Description of Artificial Sequence: Synthetic peptide
CARERLDWNSYFDLW

SEQ ID NO: 1326 - protein, 11 aa, Artificial Sequence [sequence omitted]

SEQ ID NO: 1327 - protein, 9 aa, Artificial Sequence
  Description of Artificial Sequence: Synthetic peptide
FSFSTYAMH

SEQ ID NO: 1328 - protein, 12 aa, Artificial Sequence
  Description of Artificial Sequence: Synthetic peptide
AISGGGGSTFYA

SEQ ID NO: 1329 - protein, 15 aa, Artificial Sequence
  Description of Artificial Sequence: Synthetic peptide
CARERVDWNSTFDLW

SEQ ID NO: 1330 - protein, 11 aa, Artificial Sequence
  Description of Artificial Sequence: Synthetic peptide
RASQSVTTNLA

SEQ ID NO: 1331 - protein, 11 aa, Artificial Sequence
  Description of Artificial Sequence: Synthetic peptide
CQQYHKWPPTF

SEQ ID NO: 1332 - protein, 15 aa, Artificial Sequence
  Description of Artificial Sequence: Synthetic peptide
CAREPVLWNSYFDLW

SEQ ID NO: 1333 - protein, 11 aa, Artificial Sequence
  Description of Artificial Sequence: Synthetic peptide
RACPSVSNNLV

SEQ ID NO: 1334 - protein, 12 aa, Artificial Sequence
  Description of Artificial Sequence: Synthetic peptide
RACPSVSNNYLV

SEQ ID NO: 1335 - protein, 12 aa, Artificial Sequence
  Description of Artificial Sequence: Synthetic peptide
RASQSVSNNYLV

SEQ ID NO: 1336 - protein, 9 aa, Artificial Sequence
  Description of Artificial Sequence: Synthetic peptide
FTFSTDAMS

SEQ ID NO: 1337 - protein, 15 aa, Artificial Sequence
  Description of Artificial Sequence: Synthetic peptide
CARARVDWNSYNDLW

SEQ ID NO: 1338 - protein, 11 aa, Artificial Sequence
  Description of Artificial Sequence: Synthetic peptide
RASQSVNNKLA

SEQ ID NO: 1339 - protein, 11 aa, Artificial Sequence
  Description of Artificial Sequence: Synthetic peptide
CQQYSTWPITF

SEQ ID NO: 1340 - protein, 9 aa, Artificial Sequence
  Description of Artificial Sequence: Synthetic peptide
FTFSNYAIS

SEQ ID NO: 1341 - protein, 12 aa, Artificial Sequence
  Description of Artificial Sequence: Synthetic peptide
DISGSGGTTYYA

SEQ ID NO: 1342 - protein, 15 aa, Artificial Sequence
  Description of Artificial Sequence: Synthetic peptide
CARERVDWMSYFDLW

SEQ ID NO: 1343 - protein, 9 aa, Artificial Sequence
  Description of Artificial Sequence: Synthetic peptide
FTFSNYGMT

SEQ ID NO: 1344 - protein, 12 aa, Artificial Sequence
  Description of Artificial Sequence: Synthetic peptide
SIGGSGGSTYYA

SEQ ID NO: 1345 - protein, 15 aa, Artificial Sequence
  Description of Artificial Sequence: Synthetic peptide
CARKRVDWISYFDLW

SEQ ID NO: 1346 - protein, 119 aa, Artificial Sequence
  Description of Artificial Sequence: Synthetic polypeptide
EVQLLESGGGLVQPGGSLRLSCAASGFTFSDFWMHWVRQAPGKGLEWISYISGDSGYTNYADSVKGRFTISRDNSKNTLYLQMNSLRAEDTAVYYCARDRPNYYYMDVWGKGTTVTVSS

SEQ ID NO: 1347 - protein, 119 aa, Artificial Sequence
  Description of Artificial Sequence: Synthetic polypeptide
EVQLLESGGGLVQPGGSLRLSCAASGFTFSSYWMHWVRQAPGKGLEWVSAISGSSGSTYYADSVKGRFTISRDNSKNTLYLQMNSLRAEDTAVYYCARDRPYGYYMDVWGKGTTVTVSS

SEQ ID NO: 1348 - protein, 119 aa, Artificial Sequence
  Description of Artificial Sequence: Synthetic polypeptide
EVQLLESGGGLVQPGGSLRLSCAASGFTFSDFWMHWVRQAPGKGLEWISYISGDSGYTNYADSVKGRFTISRDNSKNTLYLQMNSLRAEDTAVYYCARDRPQYYYMDVWGKGTTVTVSS

SEQ ID NO: 1349 - protein, 119 aa, Artificial Sequence
  Description of Artificial Sequence: Synthetic polypeptide
EVQLLESGGGLVQPGGSLRLSCAASGFTFSDFWMHWVRQAPGKGLEWISYISGDSGYTNYADSVKGRFTISRDNSKNTLYLQMNSLRAEDTAVYYCARDRPGYYYMDVWGKGTTVTVSS

SEQ ID NO: 1350 - protein, 119 aa, Artificial Sequence
  Description of Artificial Sequence: Synthetic polypeptide
EVQLLESGGGLVQPGGSLRLSCAASGFTFSDFWMHWVRQAPGKGLEWISYISGDSGYTNYADSVKGRFTISRDNSKNTLYLQMNSLRAEDTAVYYCARDRPYYYQMDVWGKGTTVTVSS

SEQ ID NO: 1351 - protein, 119 aa, Artificial Sequence
  Description of Artificial Sequence: Synthetic polypeptide
EVQLLESGGGLVQPGGSLRLSCAASGFTFSDFWMHWVRQAPGKGLEWISYISGDSGYTNYADSVKGRFTISRDNSKNTLYLQMNSLRAEDTAVYYCARDRPYYYGMDVWGKGTTVTVSS

SEQ ID NO: 1352 - protein, 119 aa, Artificial Sequence
  Description of Artificial Sequence: Synthetic polypeptide
EVQLLESGGGLVQPGGSLRLSCAASGFTFSNFWMHWVRQAPGKGLEWISYISGDSGYTNYADSVKGRFTISRDNSKNTLYLQMNSLRAEDTAVYYCARDRPYYYYMDVWGKGTTVTVSS

SEQ ID NO: 1353 - protein, 119 aa, Artificial Sequence
  Description of Artificial Sequence: Synthetic polypeptide
EVQLLESGGGLVQPGGSLRLSCAASGFTFSSFWMHWVRQAPGKGLEWISYISGDSGYTNYADSVKGRFTISRDNSKNTLYLQMNSLRAEDTAVYYCARDRPYYYYMDVWGKGTTVTVSS

SEQ ID NO: 1354 - protein, 119 aa, Artificial Sequence
  Description of Artificial Sequence: Synthetic polypeptide
EVQLLESGGGLVQPGGSLRLSCAASGFTFSAFWMHWVRQAPGKGLEWISYISGDSGYTNYADSVKGRFTISRDNSKNTLYLQMNSLRAEDTAVYYCARDRPYYYYMDVWGKGTTVTVSS

SEQ ID NO: 1355 - protein, 119 aa, Artificial Sequence
  Description of Artificial Sequence: Synthetic polypeptide
EVQLLESGGGLVQPGGSLRLSCAASGFTFSDFWMHWVRQAPGKGLEWISYISGDSGYTNYADSVKGRFTISRDNSNNTLYLQMNSLRAEDTAVYYCARDRPYYYYMDVWGKGTTVTVSS

SEQ ID NO: 1356 - protein, 119 aa, Artificial Sequence
  Description of Artificial Sequence: Synthetic polypeptide
EVQLLESGGGLVQPGGSLRLSCAASGFTFSSYAMSWVRQAPGKGLEWISYISGDSGYTNYADSVKGRFTISRDNSKNTLYLQMNSLRAEDTAVYYCARDRPYYYYMDVWGKGTTVTVSS

SEQ ID NO: 1357 - protein, 119 aa, Artificial Sequence
  Description of Artificial Sequence: Synthetic polypeptide
EVQLLESGGGLVQPGGSLRLSCAASGFTFSDFWMHWVRQAPGKGLEWVSAISGSGGSTYYADSVKGRFTISRDNSKNTLYLQMNSLRAEDTAVYYCARDRPYYYYMDVWGKGTTVTVSS

SEQ ID NO: 1358 - protein, 119 aa, Artificial Sequence
  Description of Artificial Sequence: Synthetic polypeptide
EVQLLESGGGLVQPGGSLRLSCAASGFTFSSYAMSWVRQAPGKGLEWVSAISGSGGSTYYADSVKGRFTISRDNSKNTLYLQMNSLRAEDTAVYYCARDRPYYYYMDVWGKGTTVTVSS

SEQ ID NO: 1359 - protein, 113 aa, Artificial Sequence
  Description of Artificial Sequence: Synthetic polypeptide
DIVMTQSPDSLAVSLGERATINCKSSQSVLYSPNNKNYLAWYQQKPGQPPKLLIYWASTRESGVPDRFSGSGSGTDFTLTISSLQAEDVAVYYCQQYYTTPPTFGQGTRLEIK

SEQ ID NO: 1360 - protein, 107 aa, Artificial Sequence
  Description of Artificial Sequence: Synthetic polypeptide
DIQMTQSPSSLSASVGDRVTITCRASQSISSYLNWYQQKPGKAPKLLIYAASSLQSGVPSRFSGSGSGTDFTLTISSLQPEDFATYYCQQSYSTPRTFGQGTKVEIK

SEQ ID NO: 1361 - protein, 107 aa, Artificial Sequence
  Description of Artificial Sequence: Synthetic polypeptide
DIQMTQSPSSLSASVGDRVTITCRASQSISSYLNWYQQKPGKAPKLLIYAASSLQSGVPSRFSGSGSGTDFTLTISSLQPEDFATYYCQQYKSYPVTFGQGTKVEIK

SEQ ID NO: 1362 - protein, 107 aa, Artificial Sequence
  Description of Artificial Sequence: Synthetic polypeptide
DIQMTQSPSSLSASVGDRVTITCRASQSVSRSLAWYQQKPGKAPKLLIYAASSLQSGVPSRFSGSGSGTDFTLTISSLQPEDFATYYCQQSYSTPRTFGQGTKVEIK

SEQ ID NO: 1363 - protein, 107 aa, Artificial Sequence
  Description of Artificial Sequence: Synthetic polypeptide
DIQMTQSPSSLSASVGDRVTITCRASQSISRSLAWYQQKPGKAPKLLIYAASSLQSGVPSRFSGSGSGTDFTLTISSLQPEDFATYYCQQYKSYPVTFGQGTKVEIK

SEQ ID NO: 1364 - protein, 107 aa, Artificial Sequence
  Description of Artificial Sequence: Synthetic polypeptide
DIQMTQSPSSLSASVGDRVTITCRASQSVSSSLAWYQQKPGKAPKLLIYAASSLQSGVPSRFSGSGSGTDFTLTISSLQPEDFATYYCQQYKSYPVTFGQGTKVEIK

SEQ ID NO: 1365 - protein, 107 aa, Artificial Sequence
  Description of Artificial Sequence: Synthetic polypeptide
DIQMTQSPSSLSASVGDRVTITCRASQSVSRYLAWYQQKPGKAPKLLIYAASSLQSGVPSRFSGSGSGTDFTLTISSLQPEDFATYYCQQYKSYPVTFGQGTKVEIK

SEQ ID NO: 1366 - protein, 107 aa, Artificial Sequence
  Description of Artificial Sequence: Synthetic polypeptide
DIQMTQSPSSLSASVGDRVTITCRASQSVSRSLNWYQQKPGKAPKLLIYAASSLQSGVPSRFSGSGSGTDFTLTISSLQPEDFATYYCQQYKSYPVTFGQGTKVEIK

SEQ ID NO: 1367 - protein, 107 aa, Artificial Sequence
  Description of Artificial Sequence: Synthetic polypeptide
DIQMTQSPSSLSASVGDRVTITCRASQSISSSLAWYQQKPGKAPKLLIYAASSLQSGVPSRFSGSGSGTDFTLTISSLQPEDFATYYCQQYKSYPVTFGQGTKVEIK

SEQ ID NO: 1368 - protein, 107 aa, Artificial Sequence
  Description of Artificial Sequence: Synthetic polypeptide
DIQMTQSPSSLSASVGDRVTITCRASQSISRYLAWYQQKPGKAPKLLIYAASSLQSGVPSRFSGSGSGTDFTLTISSLQPEDFATYYCQQYKSYPVTFGQGTKVEIK

SEQ ID NO: 1369 - protein, 107 aa, Artificial Sequence
  Description of Artificial Sequence: Synthetic polypeptide
DIQMTQSPSSLSASVGDRVTITCRASQSISRSLNWYQQKPGKAPKLLIYAASSLQSGVPSRFSGSGSGTDFTLTISSLQPEDFATYYCQQYKSYPVTFGQGTKVEIK

SEQ ID NO: 1370 - protein, 107 aa, Artificial Sequence
  Description of Artificial Sequence: Synthetic polypeptide
DIQMTQSPSSLSASVGDRVTITCRASQSVSSYLAWYQQKPGKAPKLLIYAASSLQSGVPSRFSGSGSGTDFTLTISSLQPEDFATYYCQQYKSYPVTFGQGTKVEIK

SEQ ID NO: 1371 - protein, 107 aa, Artificial Sequence
  Description of Artificial Sequence: Synthetic polypeptide
DIQMTQSPSSLSASVGDRVTITCRASQSVSSSLNWYQQKPGKAPKLLIYAASSLQSGVPSRFSGSGSGTDFTLTISSLQPEDFATYYCQQYKSYPVTFGQGTKVEIK

SEQ ID NO: 1372 - protein, 107 aa, Artificial Sequence
  Description of Artificial Sequence: Synthetic polypeptide
DIQMTQSPSSLSASVGDRVTITCRASQSVSRYLNWYQQKPGKAPKLLIYAASSLQSGVPSRFSGSGSGTDFTLTISSLQPEDFATYYCQQYKSYPVTFGQGTKVEIK

SEQ ID NO: 1373 - protein, 107 aa, Artificial Sequence
  Description of Artificial Sequence: Synthetic polypeptide
DIQMTQSPSSLSASVGDRVTITCRASQSISSSLNWYQQKPGKAPKLLIYAASSLQSGVPSRFSGSGSGTDFTLTISSLQPEDFATYYCQQYKSYPVTFGQGTKVEIK

SEQ ID NO: 1374 - protein, 107 aa, Artificial Sequence
  Description of Artificial Sequence: Synthetic polypeptide
DIQMTQSPSSLSASVGDRVTITCRASQSISRYLNWYQQKPGKAPKLLIYAASSLQSGVPSRFSGSGSGTDFTLTISSLQPEDFATYYCQQYKSYPVTFGQGTKVEIK

SEQ ID NO: 1375 - protein, 107 aa, Artificial Sequence
  Description of Artificial Sequence: Synthetic polypeptide
DIQMTQSPSSLSASVGDRVTITCRASQSISSYLAWYQQKPGKAPKLLIYAASSLQSGVPSRFSGSGSGTDFTLTISSLQPEDFATYYCQQYKSYPVTFGQGTKVEIK

SEQ ID NO: 1376 - protein, 107 aa, Artificial Sequence
  Description of Artificial Sequence: Synthetic polypeptide
DIQMTQSPSSLSASVGDRVTITCRASQSVSSYLNWYQQKPGKAPKLLIYAASSLQSGVPSRFSGSGSGTDFTLTISSLQPEDFATYYCQQYKSYPVTFGQGTKVEIK

SEQ ID NO: 1377 - protein, 119 aa, Artificial Sequence
  Description of Artificial Sequence: Synthetic polypeptide
EVQLLESGGGLVQPGGSLRLSCAASGFTFSDFWMHWVRQAPGKGLEWISYISGESGYTNYADSVKGRFTISRDNSKNTLYLQMNSLRAEDTAVYYCARDRPYYYYMDVWGKGTTVTVSS

SEQ ID NO: 1378 - protein, 119 aa, Artificial Sequence
  Description of Artificial Sequence: Synthetic polypeptide
EVQLLESGGGLVQPGGSLRLSCAASGFTFSDFWMHWVRQAPGKGLEWISYISGDSGYTQYADSVKGRFTISRDNSKNTLYLQMNSLRAEDTAVYYCARDRPYYYYMDVWGKGTTVTVSS

SEQ ID NO: 1379 - protein, 119 aa, Artificial Sequence
  Description of Artificial Sequence: Synthetic polypeptide
EVQLLESGGGLVQPGGSLRLSCAASGFTFSDFWMHWVRQAPGKGLEWISYISGDSGYTNYADSVKGRFTISRDQSKNTLYLQMNSLRAEDTAVYYCARDRPYYYYMDVWGKGTTVTVSS

SEQ ID NO: 1380 - protein, 107 aa, Artificial Sequence
  Description of Artificial Sequence: Synthetic polypeptide
DIQMTQSPSSLSASVGDRVTITCRASQSVSRSLGWYQQKPGKAPKLLIYAASSLQSGVPSRFSGSGSGTDFTLTISSLQPEDFATYYCQQYKSYPVTFGQGTKVEIK

SEQ ID NO: 1381 - protein, 107 aa, Artificial Sequence
  Description of Artificial Sequence: Synthetic polypeptide
DIQMTQSPSSLSASVGDRVTITCRASQSVSRSLDWYQQKPGKAPKLLIYAASSLQSGVPSRFSGSGSGTDFTLTISSLQPEDFATYYCQQYKSYPVTFGQGTKVEIK

SEQ ID NO: 1382 - protein, 107 aa, Artificial Sequence
  Description of Artificial Sequence: Synthetic polypeptide
DIQMTQSPSSLSASVGDRVTITCRASQSVSRSLTWYQQKPGKAPKLLIYAASSLQSGVPSRFSGSGSGTDFTLTISSLQPEDFATYYCQQYKSYPVTFGQGTKVEIK

SEQ ID NO: 1383 - protein, 107 aa, Artificial Sequence
  Description of Artificial Sequence: Synthetic polypeptide
DIQMTQSPSSLSASVGDRVTITCRASQSVSRSLSWYQQKPGKAPKLLIYAASSLQSGVPSRFSGSGSGTDFTLTISSLQPEDFATYYCQQYKSYPVTFGQGTKVEIK

SEQ ID NO: 1384 - protein, 107 aa, Artificial Sequence
  Description of Artificial Sequence: Synthetic polypeptide
DIQMTQSPSSLSASVGDRVTITCRASQSVSRSLEWYQQKPGKAPKLLIYAASSLQSGVPSRFSGSGSGTDFTLTISSLQPEDFATYYCQQYKSYPVTFGQGTKVEIK

SEQ ID NO: 1385 - protein, 107 aa, Artificial Sequence
  Description of Artificial Sequence: Synthetic polypeptide
DIQMTQSPSSLSASVGDRVTITCRASQSVSRSLKWYQQKPGKAPKLLIYAASSLQSGVPSRFSGSGSGTDFTLTISSLQPEDFATYYCQQYKSYPVTFGQGTKVEIK

SEQ ID NO: 1386 - protein, 107 aa, Artificial Sequence
  Description of Artificial Sequence: Synthetic polypeptide
DIQMTQSPSSLSASVGDRVTITCRASQSVSRSLLWYQQKPGKAPKLLIYAASSLQSGVPSRFSGSGSGTDFTLTISSLQPEDFATYYCQQYKSYPVTFGQGTKVEIK

SEQ ID NO: 1387 - protein, 119 aa, Artificial Sequence
  Description of Artificial Sequence: Synthetic polypeptide
EVQLLESGGGLVQPGGSLRLSCAASGFTFSDFWMHWVRQAPGKGLEWISYISGDSGYTNYADSVKGRFTISRDNSKNTLYLQMNSLRAEDTAVYYCARDRPYYYIMDVWGKGTTVTVSS

SEQ ID NO: 1388 - protein, 119 aa, Artificial Sequence
  Description of Artificial Sequence: Synthetic polypeptide
EVQLLESGGGLVQPGGSLRLSCAASGFTFSDFWMHWVRQAPGKGLEWISYISGDSGYTNYADSVKGRFTISRDNSKNTLYLQMNSLRAEDTAVYYCARDRPYYYWMDVWGKGTTVTVSS

SEQ ID NO: 1389 - protein, 119 aa, Artificial Sequence
  Description of Artificial Sequence: Synthetic polypeptide
EVQLLESGGGLVQPGGSLRLSCAASGFTFSDFWMHWVRQAPGKGLEWISYISGDSGYTNYADSVKGRFTISRDNSKNTLYLQMNSLRAEDTAVYYCARDRPSYYYMDVWGKGTTVTVSS

SEQ ID NO: 1390 - protein, 119 aa, Artificial Sequence
  Description of Artificial Sequence: Synthetic polypeptide
EVQLLESGGGLVQPGGSLRLSCAASGFTFSDFWMHWVRQAPGKGLEWISYISGDSGYTNYADSVKGRFTISRDNSKNTLYLQMNSLRAEDTAVYYCARDRPTYYYMDVWGKGTTVTVSS

SEQ ID NO: 1391 - protein, 119 aa, Artificial Sequence
  Description of Artificial Sequence: Synthetic polypeptide
EVQLLESGGGLVQPGGSLRLSCAASGFTFSDYWMHWVRQAPGKGLEWISYISGDSGYTNYADSVKGRFTISRDNSKNTLYLQMNSLRAEDTAVYYCARDRPYYYYMDVWGKGTTVTVSS

SEQ ID NO: 1392 - protein, 119 aa, Artificial Sequence
  Description of Artificial Sequence: Synthetic polypeptide
EVQLLESGGGLVQPGGSLRLSCAASGFTFSSYWMHWVRQAPGKGLEWISYISGDSGYTNYADSVKGRFTISRDNSKNTLYLQMNSLRAEDTAVYYCARDRPYYYYMDVWGKGTTVTVSS

SEQ ID NO: 1393 - protein, 119 aa, Artificial Sequence
  Description of Artificial Sequence: Synthetic polypeptide
EVQLLESGGGLVQPGGSLRLSCAASGFTFSDFWMHWVRQAPGKGLEWISAISGSSGSTYYADSVKGRFTISRDNSKNTLYLQMNSLRAEDTAVYYCARDRPYYYYMDVWGKGTTVTVSS

SEQ ID NO: 1394 - protein, 119 aa, Artificial Sequence
  Description of Artificial Sequence: Synthetic polypeptide
EVQLLESGGGLVQPGGSLRLSCAASGFTFSSYWMHWVRQAPGKGLEWISAISGSSGSTYYADSVKGRFTISRDNSKNTLYLQMNSLRAEDTAVYYCARDRPYYYYMDVWGKGTTVTVSS

SEQ ID NO: 1395 - protein, 119 aa, Artificial Sequence
  Description of Artificial Sequence: Synthetic polypeptide
EVQLLESGGGLVQPGGSLRLSCAASGFTFSSYWMHWVRQAPGKGLEWVSAISGSGGSTYYADSVKGRFTISRDNSKNTLYLQMNSLRAEDTAVYYCARDRPYYYYMDVWGKGTTVTVSS

SEQ ID NO: 1396 - protein, 119 aa, Artificial Sequence
  Description of Artificial Sequence: Synthetic polypeptide
EVQLLESGGGLVQPGGSLRLSCAASGFTFSSYWMHWVRQAPGKGLEWISYISGDSGYTNYADSVKGRFTISRDNSKNTLYLQMNSLRAEDTAVYYCARDRPYYYIMDVWGKGTTVTVSS

SEQ ID NO: 1397 - protein, 119 aa, Artificial Sequence
  Description of Artificial Sequence: Synthetic polypeptide
EVQLLESGGGLVQPGGSLRLSCAASGFTFSDFWMHWVRQAPGKGLEWVSAISGSGGSTYYADSVKGRFTISRDNSKNTLYLQMNSLRAEDTAVYYCARDRPYYYIMDVWGKGTTVTVSS

SEQ ID NO: 1398 - protein, 119 aa, Artificial Sequence
  Description of Artificial Sequence: Synthetic polypeptide
EVQLLESGGGLVQPGGSLRLSCAASGFTFSSYWMHWVRQAPGKGLEWVSAISGSGGSTYYADSVKGRFTISRDNSKNTLYLQMNSLRAEDTAVYYCARDRPYYYIMDVWGKGTTVTVSS

SEQ ID NO: 1399 - protein, 14 aa, Artificial Sequence
  Description of Artificial Sequence: Synthetic peptide
CARDRPNYYYMDVW

SEQ ID NO: 1400 - protein, 14 aa, Artificial Sequence
  Description of Artificial Sequence: Synthetic peptide
CARDRPQYYYMDVW

SEQ ID NO: 1401 - protein, 14 aa, Artificial Sequence
  Description of Artificial Sequence: Synthetic peptide
CARDRPGYYYMDVW

SEQ ID NO: 1402 - protein, 14 aa, Artificial Sequence
  Description of Artificial Sequence: Synthetic peptide
CARDRPYYYQMDVW

SEQ ID NO: 1403 - protein, 14 aa, Artificial Sequence [sequence omitted]

SEQ ID NO: 1404 - protein, 9 aa, Artificial Sequence
  Description of Artificial Sequence: Synthetic peptide
FTFSNFWMH

SEQ ID NO: 1405 - protein, 9 aa, Artificial Sequence
  Description of Artificial Sequence: Synthetic peptide
FTFSSFWMH

SEQ ID NO: 1406 - protein, 9 aa, Artificial Sequence
  Description of Artificial Sequence: Synthetic peptide
FTFSAFWMH

SEQ ID NO: 1407 - protein, 9 aa, Artificial Sequence
  Description of Artificial Sequence: Synthetic peptide
QQSYSTPRT

SEQ ID NO: 1408 - protein, 11 aa, Artificial Sequence
  Description of Artificial Sequence: Synthetic peptide
RASQSISRSLA

SEQ ID NO: 1409 - protein, 11 aa, Artificial Sequence
  Description of Artificial Sequence: Synthetic peptide
RASQSVSSSLA

SEQ ID NO: 1410 - protein, 11 aa, Artificial Sequence
  Description of Artificial Sequence: Synthetic peptide
RASQSVSRYLA

SEQ ID NO: 1411 - protein, 11 aa, Artificial Sequence
  Description of Artificial Sequence: Synthetic peptide
RASQSVSRSLN

SEQ ID NO: 1412 - protein, 11 aa, Artificial Sequence
  Description of Artificial Sequence: Synthetic peptide
RASQSISSSLA

SEQ ID NO: 1413 - protein, 11 aa, Artificial Sequence
  Description of Artificial Sequence: Synthetic peptide
RASQSISRYLA

SEQ ID NO: 1414 - protein, 11 aa, Artificial Sequence
  Description of Artificial Sequence: Synthetic peptide
RASQSISRSLN

SEQ ID NO: 1415 - protein, 11 aa, Artificial Sequence
  Description of Artificial Sequence: Synthetic peptide
RASQSVSSYLA

SEQ ID NO: 1416 - protein, 11 aa, Artificial Sequence
  Description of Artificial Sequence: Synthetic peptide
RASQSVSSSLN

SEQ ID NO: 1417 - protein, 11 aa, Artificial Sequence
  Description of Artificial Sequence: Synthetic peptide
RASQSVSRYLN

SEQ ID NO: 1418 - protein, 11 aa, Artificial Sequence
  Description of Artificial Sequence: Synthetic peptide
RASQSISSSLN

SEQ ID NO: 1419 - protein, 11 aa, Artificial Sequence
  Description of Artificial Sequence: Synthetic peptide
RASQSISRYLN

SEQ ID NO: 1420 - protein, 11 aa, Artificial Sequence
  Description of Artificial Sequence: Synthetic peptide
RASQSISSYLA

SEQ ID NO: 1421 - protein, 11 aa, Artificial Sequence
  Description of Artificial Sequence: Synthetic peptide
RASQSVSSYLN

SEQ ID NO: 1422 - protein, 13 aa, Artificial Sequence
  Description of Artificial Sequence: Synthetic peptide
SYISGESGYTNYA

SEQ ID NO: 1423 - protein, 13 aa, Artificial Sequence
  Description of Artificial Sequence: Synthetic peptide
SYISGDSGYTQYA

SEQ ID NO: 1424 - protein, 11 aa, Artificial Sequence
  Description of Artificial Sequence: Synthetic peptide
RASQSVSRSLG

SEQ ID NO: 1425 - protein, 11 aa, Artificial Sequence
  Description of Artificial Sequence: Synthetic peptide
RASQSVSRSLD

SEQ ID NO: 1426 - protein, 11 aa, Artificial Sequence
  Description of Artificial Sequence: Synthetic peptide
RASQSVSRSLT

SEQ ID NO: 1427 - protein, 11 aa, Artificial Sequence
  Description of Artificial Sequence: Synthetic peptide
RASQSVSRSLS

SEQ ID NO: 1428 - protein, 11 aa, Artificial Sequence
  Description of Artificial Sequence: Synthetic peptide
RASQSVSRSLE

SEQ ID NO: 1429 - protein, 11 aa, Artificial Sequence
  Description of Artificial Sequence: Synthetic peptide
RASQSVSRSLK

SEQ ID NO: 1430 - protein, 11 aa, Artificial Sequence
  Description of Artificial Sequence: Synthetic peptide
RASQSVSRSLL

SEQ ID NO: 1431 - protein, 14 aa, Artificial Sequence
  Description of Artificial Sequence: Synthetic peptide
CARDRPYYYIMDVW

SEQ ID NO: 1432 - protein, 14 aa, Artificial Sequence
  Description of Artificial Sequence: Synthetic peptide
CARDRPYYYWMDVW

SEQ ID NO: 1433 - protein, 14 aa, Artificial Sequence
  Description of Artificial Sequence: Synthetic peptide
CARDRPSYYYMDVW

SEQ ID NO: 1434 - protein, 14 aa, Artificial Sequence
  Description of Artificial Sequence: Synthetic peptide
CARDRPTYYYMDVW

SEQ ID NO: 1435 - protein, 9 aa, Artificial Sequence
  Description of Artificial Sequence: Synthetic peptide
FTFSDYWMH

SEQ ID NO: 1436 - protein, 13 aa, Artificial Sequence
  Description of Artificial Sequence: Synthetic peptide
SAISGSSGSTYYA

SEQ ID NO: 1437 - protein, 24 aa, Artificial Sequence
  Description of Artificial Sequence: Synthetic peptide
MKWVTFISLLFLFSSAYSRGVFRR

SEQ ID NO: 1438 - protein, 119 aa, Artificial Sequence
  Description of Artificial Sequence: Synthetic polypeptide
EVQLLESGGGLVQPGGSLRLSCAASGFTFSNSDMSWVRQAPGKGLEWVSGITISGGSTYYADSVKGRFTISRDNSKNTLYLQMNSLRAEDTAVYYCARGRGGSGWLDYWGQGTLVTVSS

SEQ ID NO: 1439 - protein, 119 aa, Artificial Sequence
  Description of Artificial Sequence: Synthetic polypeptide
EVQLLESGGGLVQPGGSLRLSCAASGFTFSSYWMHWVRQAPGKGLEWVSAISGSSGSTYYADSVKGRFTISRDNSKNTLYLQMNSLRAEDTAVYYCARDRPYYYYMDVWGKGTTVTVSS

SEQ ID NO: 1440 - protein, 119 aa, Artificial Sequence
  Description of Artificial Sequence: Synthetic polypeptide
EVQLLESGGGLVQPGGSLRLSCAASGFTFSSYWMHWVRQAPGKGLEWISAISGSGGSTYYADSVKGRFTISRDNSKNTLYLQMNSLRAEDTAVYYCARDRPYGYYMDVWGKGTTVTVSS

SEQ ID NO: 1441 - protein, 119 aa, Artificial Sequence
  Description of Artificial Sequence: Synthetic polypeptide
EVQLLESGGGLVQPGGSLRLSCAASGFTFSSYWMHWVRQAPGKGLEWISAISGSGGSTYYADSVKGRFTISRDNSKNTLYLQMNSLRAEDTAVYYCARDRPYYYYMDVWGKGTTVTVSS

SEQ ID NO: 1442 - protein, 119 aa, Artificial Sequence
  Description of Artificial Sequence: Synthetic polypeptide
EVQLLESGGGLVQPGGSLRLSCAASGFTFSSYWMHWVRQAPGKGLEWVSAISGSGGSTYYADSVKGRFTISRDNSKNTLYLQMNSLRAEDTAVYYCARDRPYGYYMDVWGKGTTVTVSS

SEQ ID NO: 1443 - protein, 119 aa, Artificial Sequence
  Description of Artificial Sequence: Synthetic polypeptide
EVQLLESGGGLVQPGGSLRLSCAASGFTFSSYWMHWVRQAPGKGLEWVSYISGSGGYTNYADSVKGRFTISRDNSKNTLYLQMNSLRAEDTAVYYCARDRPYGYYMDVWGKGTTVTVSS

SEQ ID NO: 1444 - protein, 119 aa, Artificial Sequence
  Description of Artificial Sequence: Synthetic polypeptide
EVQLLESGGGLVQPGGSLRLSCAASGFTFSSYWMHWVRQAPGKGLEWVSAISGSGGSTYYADSVKGRFTISRDNSKNTLYLQMNSLRAEDTAVYYCARDRPYYYDMDVWGKGTTVTVSS

SEQ ID NO: 1445 - protein, 119 aa, Artificial Sequence
  Description of Artificial Sequence: Synthetic polypeptide
EVQLLESGGGLVQPGGSLRLSCAASGFTFSSYWMHWVRQAPGKGLEWVSYISGSGGYTNYADSVKGRFTISRDNSKNTLYLQMNSLRAEDTAVYYCARDRPYYYDMDVWGKGTTVTVSS

SEQ ID NO: 1446 - protein, 119 aa, Artificial Sequence
  Description of Artificial Sequence: Synthetic polypeptide
EVQLLESGGGLVQPGGSLRLSCAASGFTFSSYDMSWVRQAPGKGLEWVSGITISGGSTYYADSVKGRFTISRDNSKNTLYLQMNSLRAEDTAVYYCARGRGGSGWLDYWGQGTLVTVSS

SEQ ID NO: 1447 - protein, 119 aa, Artificial Sequence
  Description of Artificial Sequence: Synthetic polypeptide
EVQLLESGGGLVQPGGSLRLSCAASGFTFSSYDMSWVRQAPGKGLEWVSGITISGGSTYYADSVKGRFTISRDNSKNTLYLQMNSLRAEDTAVYYCARGRGGSGWLDYWGQGTDVTVSS

SEQ ID NO: 1448 - protein, 113 aa, Artificial Sequence
  Description of Artificial Sequence: Synthetic polypeptide
QVQLVQSGAEVKKPGASVKVSCKASGYSFTTYYMHWVRQAPGQGLEWMGIIAPSGGSTSYAQKFQGRVTMTRDTSTSTVYMELSSLRSEDTAVYYCASGWVYWGQGTLVTVSS

SEQ ID NO: 1449 - protein, 107 aa, Artificial Sequence
  Description of Artificial Sequence: Synthetic polypeptide
DIQMTQSPSSLSASVGDRVTITCQASRDIKNYLAWYQQKPGKAPKLLIYAASSLQSGVPSRFSGSGSGTDFTLTISSLQPEDFATYYCQQSYSTPPTFGPGTKVDIK

SEQ ID NO: 1450 - protein, 119 aa, Artificial Sequence
  Description of Artificial Sequence: Synthetic polypeptide
EVQLLESGGGLVQPGGSLRLSCAASGFTFSDFAMHWVRQAPGKGLEWISYISGDSGYTNYADSVKGRFTISRDNSKNTLYLQMNSLRAEDTAVYYCARDRPYYYYMDVWGKGTTVTVSS

SEQ ID NO: 1451 - protein, 119 aa, Artificial Sequence
  Description of Artificial Sequence: Synthetic polypeptide
EVQLLESGGGLVQPGGSLRLSCAASGFTFSDFWMSWVRQAPGKGLEWISYISGDSGYTNYADSVKGRFTISRDNSKNTLYLQMNSLRAEDTAVYYCARDRPYYYYMDVWGKGTTVTVSS

SEQ ID NO: 1452 - protein, 119 aa, Artificial Sequence
  Description of Artificial Sequence: Synthetic polypeptide
EVQLLESGGGLVQPGGSLRLSCAASGFTFSDFWMHWVRQAPGKGLEWVSYISGDSGYTNYADSVKGRFTISRDNSKNTLYLQMNSLRAEDTAVYYCARDRPYYYYMDVWGKGTTVTVSS

SEQ ID NO: 1453 - protein, 119 aa, Artificial Sequence
  Description of Artificial Sequence: Synthetic polypeptide
EVQLLESGGGLVQPGGSLRLSCAASGFTFSDFWMHWVRQAPGKGLEWISAISGDSGYTNYADSVKGRFTISRDNSKNTLYLQMNSLRAEDTAVYYCARDRPYYYYMDVWGKGTTVTVSS

SEQ ID NO: 1454 - protein, 119 aa, Artificial Sequence
  Description of Artificial Sequence: Synthetic polypeptide
EVQLLESGGGLVQPGGSLRLSCAASGFTFSDFWMHWVRQAPGKGLEWISYISGSSGYTNYADSVKGRFTISRDNSKNTLYLQMNSLRAEDTAVYYCARDRPYYYYMDVWGKGTTVTVSS

SEQ ID NO: 1455 - protein, 119 aa, Artificial Sequence
  Description of Artificial Sequence: Synthetic polypeptide
EVQLLESGGGLVQPGGSLRLSCAASGFTFSDFWMHWVRQAPGKGLEWISYISGDGGYTNYADSVKGRFTISRDNSKNTLYLQMNSLRAEDTAVYYCARDRPYYYYMDVWGKGTTVTVSS

SEQ ID NO: 1456 - protein, 119 aa, Artificial Sequence
  Description of Artificial Sequence: Synthetic polypeptide
EVQLLESGGGLVQPGGSLRLSCAASGFTFSDFWMHWVRQAPGKGLEWISYISGDSGSTNYADSVKGRFTISRDNSKNTLYLQMNSLRAEDTAVYYCARDRPYYYYMDVWGKGTTVTVSS

SEQ ID NO: 1457 - protein, 119 aa, Artificial Sequence
  Description of Artificial Sequence: Synthetic polypeptide
EVQLLESGGGLVQPGGSLRLSCAASGFTFSDFWMHWVRQAPGKGLEWISYISGDSGYTYYADSVKGRFTISRDNSKNTLYLQMNSLRAEDTAVYYCARDRPYYYYMDVWGKGTTVTVSS

SEQ ID NO: 1458 - protein, 119 aa, Artificial Sequence
  Description of Artificial Sequence: Synthetic polypeptide
EVQLLESGGGLVQPGGSLRLSCAASGFTFSDFWMHWVRQAPGKGLEWISYISGDSGYTNYAASVKGRFTISRDNSKNTLYLQMNSLRAEDTAVYYCARDRPYYYYMDVWGKGTTVTVSS

SEQ ID NO: 1459 - protein, 119 aa, Artificial Sequence
  Description of Artificial Sequence: Synthetic polypeptide
EVQLLESGGGLVQPGGSLRLSCAASGFTFSDFWMHWVRQAPGKGLEWISYISGDSGYTNYAQSVKGRFTISRDNSKNTLYLQMNSLRAEDTAVYYCARDRPYYYYMDVWGKGTTVTVSS

SEQ ID NO: 1460 - protein, 119 aa, Artificial Sequence
  Description of Artificial Sequence: Synthetic polypeptide
EVQLLESGGGLVQPGGSLRLSCAASGFTFSDFWMHWVRQAPGKGLEWISYISGDSGYTNYADSVKGRFTISRDASKNTLYLQMNSLRAEDTAVYYCARDRPYYYYMDVWGKGTTVTVSS

SEQ ID NO: 1461 - protein, 119 aa, Artificial Sequence
  Description of Artificial Sequence: Synthetic polypeptide
EVQLLESGGGLVQPGGSLRLSCAASGFTFSDFWMHWVRQAPGKGLEWISYISGDSGYTNYADSVKGRFTISRDNSKNTLYLQMASLRAEDTAVYYCARDRPYYYYMDVWGKGTTVTVSS

SEQ ID NO: 1462 - protein, 119 aa, Artificial Sequence
  Description of Artificial Sequence: Synthetic polypeptide
EVQLLESGGGLVQPGGSLRLSCAASGFTFSDFWMHWVRQAPGKGLEWISYISGDSGYTNYADSVKGRFTISRDNSKNTLYLQMGSLRAEDTAVYYCARDRPYYYYMDVWGKGTTVTVSS

SEQ ID NO: 1463 - protein, 119 aa, Artificial Sequence
  Description of Artificial Sequence: Synthetic polypeptide
EVQLLESGGGLVQPGGSLRLSCAASGFTFSDFWMHWVRQAPGKGLEWISYISGDSGYTNYADSVKGRFTISRDNSKNTLYLQMQSLRAEDTAVYYCARDRPYYYYMDVWGKGTTVTVSS

SEQ ID NO: 1464 - protein, 107 aa, Artificial Sequence
  Description of Artificial Sequence: Synthetic polypeptide
DIQMTQSPSSLSASVGDRVTITCRASQSVSRSLAWYQQKPGKAPKLLIYAASSLQSGVPSRFSGSGSGTDFTLTISSLQPEDFATYYCQQSKSYPVTFGQGTKVEIK

SEQ ID NO: 1465 - protein, 107 aa, Artificial Sequence
  Description of Artificial Sequence: Synthetic polypeptide
DIQMTQSPSSLSASVGDRVTITCRASQSVSRSLAWYQQKPGKAPKLLIYAASSLQSGVPSRFSGSGSGTDFTLTISSLQPEDFATYYCQQYYSYPVTFGQGTKVEIK

SEQ ID NO: 1466 - protein, 107 aa, Artificial Sequence
  Description of Artificial Sequence: Synthetic polypeptide
DIQMTQSPSSLSASVGDRVTITCRASQSVSRSLAWYQQKPGKAPKLLIYAASSLQSGVPSRFSGSGSGTDFTLTISSLQPEDFATYYCQQYKSTPVTFGQGTKVEIK

SEQ ID NO: 1467 - protein, 107 aa, Artificial Sequence
  Description of Artificial Sequence: Synthetic polypeptide
DIQMTQSPSSLSASVGDRVTITCRASQSVSRSLAWYQQKPGKAPKLLIYAASSLQSGVPSRFSGSGSGTDFTLTISSLQPEDFATYYCQQYKSYPRTFGQGTKVEIK

SEQ ID NO: 1468 - protein, 119 aa, Artificial Sequence
  Description of Artificial Sequence: Synthetic polypeptide
EVQLLESGGGLVQPGGSLRLSCAASGFTFSDFWMHWVRQAPGKGLEWISYISGDSGYTNYADSVKGRFTISRDNSKNTLYLQMNSLRAEDTAVYYCARDRPYDYYMDVWGKGTTVTVSS

SEQ ID NO: 1469 - protein, 119 aa, Artificial Sequence
  Description of Artificial Sequence: Synthetic polypeptide
EVQLLESGGGLVQPGGSLRLSCAASGFTFSDFWMHWVRQAPGKGLEWISYISGDSGYTNYADSVKGRFTISRDNSKNTLYLQMNSLRAEDTAVYYCARDRPYGYYMDVWGKGTTVTVSS

SEQ ID NO: 1470 - protein, 119 aa, Artificial Sequence
  Description of Artificial Sequence: Synthetic polypeptide
EVQLLESGGGLVQPGGSLRLSCAASGFTFSDFWMHWVRQAPGKGLEWISYISGDSGYTNYADSVKGRFTISRDNSKNTLYLQMNSLRAEDTAVYYCARDRPYNYYMDVWGKGTTVTVSS

SEQ ID NO: 1471 - protein, 119 aa, Artificial Sequence
  Description of Artificial Sequence: Synthetic polypeptide
EVQLLESGGGLVQPGGSLRLSCAASGFTFSDFWMHWVRQAPGKGLEWISYISGDSGYTNYADSVKGRFTISRDNSKNTLYLQMNSLRAEDTAVYYCARDRPYSYYMDVWGKGTTVTVSS

SEQ ID NO: 1472 - protein, 119 aa, Artificial Sequence
  Description of Artificial Sequence: Synthetic polypeptide
EVQLLESGGGLVQPGGSLRLSCAASGFTFSDFWMHWVRQAPGKGLEWISYISGDSGYTNYADSVKGRFTISRDNSKNTLYLQMNSLRAEDTAVYYCARDRPYYYDMDVWGKGTTVTVSS

SEQ ID NO: 1473 - protein, 119 aa, Artificial Sequence
  Description of Artificial Sequence: Synthetic polypeptide
EVQLLESGGGLVQPGGSLRLSCAASGFTFSDFWMHWVRQAPGKGLEWISYISGDSGYTNYADSVKGRFTISRDNSKNTLYLQMNSLRAEDTAVYYCARDRPYYYEMDVWGKGTTVTVSS

SEQ ID NO: 1474 - protein, 119 aa, Artificial Sequence
  Description of Artificial Sequence: Synthetic polypeptide
EVQLLESGGGLVQPGGSLRLSCAASGFTFSDFWMHWVRQAPGKGLEWISYISGDSGYTNYADSVKGRFTISRDNSKNTLYLQMNSLRAEDTAVYYCARDRPYYYKMDVWGKGTTVTVSS

SEQ ID NO: 1475 - protein, 119 aa, Artificial Sequence
  Description of Artificial Sequence: Synthetic polypeptide
EVQLLESGGGLVQPGGSLRLSCAASGFTFSDFWMHWVRQAPGKGLEWISYISGDSGYTNYADSVKGRFTISRDNSKNTLYLQMNSLRAEDTAVYYCARDRPYYYSMDVWGKGTTVTVSS

SEQ ID NO: 1476 - protein, 119 aa, Artificial Sequence
  Description of Artificial Sequence: Synthetic polypeptide
EVQLLESGGGLVQPGGSLRLSCAASGFTFSSYDMSWVRQAPGKGLEWVSGITISGGSTYYADSVKGRFTISRDNSKNTLYLQMNSLRAEDTAVYYCARGRGGSGWLDYWGQGTTVTVSS

SEQ ID NO: 1477 - protein, 119 aa, Artificial Sequence
  Description of Artificial Sequence: Synthetic polypeptide
EVQLLESGGGLVQPGGSLRLSCAASGFTFSSYWMHWVRQAPGKGLEWVSYISGSGGYTNYADSVKGRFTISRDNSKNTLYLQMNSLRAEDTAVYYCARDRPYYYDIDVWGKGTTVTVSS

SEQ ID NO: 1478 - protein, 113 aa, Artificial Sequence
  Description of Artificial Sequence: Synthetic polypeptide
EVQLVQSGAEVKKPGASVKVSCKASGYSFTSYYMHWVRQAPGQGLEWMGIINPSGGSTSYAQKFQGRVTMTRDTSTSTVYMELSSLRSEDTAVYYCASGWVYWGQGTLVTVSS

SEQ ID NO: 1479 - protein, 107 aa, Artificial Sequence
  Description of Artificial Sequence: Synthetic polypeptide
DIQMTQSPSSLSASVGDRVTITCRASQSISSYLAWYQQKPGKAPKLLIYAASSLQSGVPSRFSGSGSGTDFTLTISSLQPEDFATYYCQQSYSTPPTFGPGTKVDIK

SEQ ID NO: 1480 - protein, 119 aa, Artificial Sequence
  Description of Artificial Sequence: Synthetic polypeptide
EVQLLESGGGLVQPGGSLRLSCAASGFTFSSYWMHWVRQAPGKGLEWVSYISGSGGYTNYADSVKGRFTISRDNSKNTLYLQMNSLRAEDTAVYYCARDRPYYYDLDVWGKGTTVTVSS

SEQ ID NO: 1481 - protein, 9 aa, Artificial Sequence
  Description of Artificial Sequence: Synthetic peptide
FTFSNSDMS

SEQ ID NO: 1482 - protein, 14 aa, Artificial Sequence
  Description of Artificial Sequence: Synthetic peptide
VSGITISGGSTYYA

SEQ ID NO: 1483 - protein, 12 aa, Artificial Sequence
  Description of Artificial Sequence: Synthetic peptide
ARGRGGSGWLDY

SEQ ID NO: 1484 - protein, 17 aa, Artificial Sequence
  Description of Artificial Sequence: Synthetic peptide
KSSQSVLYSPNNKNYLA

SEQ ID NO: 1485 - protein, 7 aa, Artificial Sequence
  Description of Artificial Sequence: Synthetic peptide
WASTRES

SEQ ID NO: 1486 - protein, 9 aa, Artificial Sequence
  Description of Artificial Sequence: Synthetic peptide
QQYYTTPPT

SEQ ID NO: 1487 - protein, 9 aa, Artificial Sequence
  Description of Artificial Sequence: Synthetic peptide
FTFSSYDMS

SEQ ID NO: 1488 - protein, 14 aa, Artificial Sequence
  Description of Artificial Sequence: Synthetic peptide
MGIIAPSGGSTSYA

SEQ ID NO: 1489 - protein, 6 aa, Artificial Sequence
  Description of Artificial Sequence: Synthetic peptide
ASGWVY

SEQ ID NO: 1490 - protein, 11 aa, Artificial Sequence
  Description of Artificial Sequence: Synthetic peptide
QASRDIKNYLA

SEQ ID NO: 1491 - protein, 7 aa, Artificial Sequence
  Description of Artificial Sequence: Synthetic peptide
AASSLQS

SEQ ID NO: 1492 - protein, 9 aa, Artificial Sequence
  Description of Artificial Sequence: Synthetic peptide
QQSYSTPPT

SEQ ID NO: 1493 - protein, 9 aa, Artificial Sequence
  Description of Artificial Sequence: Synthetic peptide
FTFSDFWMH

SEQ ID NO: 1494 - protein, 13 aa, Artificial Sequence
  Description of Artificial Sequence: Synthetic peptide
SYISGDSGYTNYA

SEQ ID NO: 1495 - protein, 14 aa, Artificial Sequence [sequence omitted]

SEQ ID NO: 1496 - protein, 11 aa, Artificial Sequence
  Description of Artificial Sequence: Synthetic peptide
RASQSVSRSLA

SEQ ID NO: 1497 - protein, 5 aa, Artificial Sequence
  Description of Artificial Sequence: Synthetic peptide
SSLQS

SEQ ID NO: 1498 - protein, 9 aa, Artificial Sequence
  Description of Artificial Sequence: Synthetic peptide
QQYKSYPVT

SEQ ID NO: 1499 - protein, 9 aa, Artificial Sequence
  Description of Artificial Sequence: Synthetic peptide
FTFSSYWMH

SEQ ID NO: 1500 - protein, 13 aa, Artificial Sequence
  Description of Artificial Sequence: Synthetic peptide
SAISGSSGSTYYA

SEQ ID NO: 1501 - protein, 14 aa, Artificial Sequence
  Description of Artificial Sequence: Synthetic peptide
CARDRPYGYYMDVW

SEQ ID NO: 1502 - protein, 11 aa, Artificial Sequence
  Description of Artificial Sequence: Synthetic peptide
RASQSISSSLA

SEQ ID NO: 1503 - protein, 14 aa, Artificial Sequence [sequence omitted]

SEQ ID NO: 1504 - protein, 11 aa, Artificial Sequence
  Description of Artificial Sequence: Synthetic peptide
RASQSISRSLA

SEQ ID NO: 1505 - protein, 13 aa, Artificial Sequence
  Description of Artificial Sequence: Synthetic peptide
SAISGSGGSTYYA

SEQ ID NO: 1506 - protein, 13 aa, Artificial Sequence
  Description of Artificial Sequence: Synthetic peptide
SYISGSGGYTNYA

SEQ ID NO: 1507 - protein, 14 aa, Artificial Sequence
  Description of Artificial Sequence: Synthetic peptide
CARDRPYYYDMDVW

SEQ ID NO: 1508 - protein, 9 aa, Artificial Sequence
  Description of Artificial Sequence: Synthetic peptide
FTFSSFWMH

SEQ ID NO: 1509 - protein, 9 aa, Artificial Sequence
  Description of Artificial Sequence: Synthetic peptide
FTFSDYWMH

SEQ ID NO: 1510 - protein, 9 aa, Artificial Sequence
  Description of Artificial Sequence: Synthetic peptide
FTFSDFAMH

SEQ ID NO: 1511 - protein, 9 aa, Artificial Sequence
  Description of Artificial Sequence: Synthetic peptide
FTFSDFWMS

SEQ ID NO: 1512 - protein, 13 aa, Artificial Sequence
  Description of Artificial Sequence: Synthetic peptide
SAISGDSGYTNYA

SEQ ID NO: 1513 - protein, 13 aa, Artificial Sequence
  Description of Artificial Sequence: Synthetic peptide
SYISGSSGYTNYA

SEQ ID NO: 1514 - protein, 13 aa, Artificial Sequence
  Description of Artificial Sequence: Synthetic peptide
SYISGDGGYTNYA

SEQ ID NO: 1515 - protein, 13 aa, Artificial Sequence
  Description of Artificial Sequence: Synthetic peptide
SYISGDSGSTNYA

SEQ ID NO: 1516 - protein, 13 aa, Artificial Sequence
  Description of Artificial Sequence: Synthetic peptide
SYISGDSGYTYYA

SEQ ID NO: 1517 - protein, 11 aa, Artificial Sequence
  Description of Artificial Sequence: Synthetic peptide
RASQSVSSSLA

SEQ ID NO: 1518 - protein, 11 aa, Artificial Sequence
  Description of Artificial Sequence: Synthetic peptide
RASQSVSRYLA

SEQ ID NO: 1519 - protein, 11 aa, Artificial Sequence
  Description of Artificial Sequence: Synthetic peptide
RASQSVSRSLN

SEQ ID NO: 1520 - protein, 9 aa, Artificial Sequence
  Description of Artificial Sequence: Synthetic peptide
QQSKSYPVT

SEQ ID NO: 1521 - protein, 9 aa, Artificial Sequence
  Description of Artificial Sequence: Synthetic peptide
QQYYSYPVT

SEQ ID NO: 1522 - protein, 9 aa, Artificial Sequence
  Description of Artificial Sequence: Synthetic peptide
QQYKSTPVT

SEQ ID NO: 1523 - protein, 9 aa, Artificial Sequence
  Description of Artificial Sequence: Synthetic peptide
QQYKSYPRT

SEQ ID NO: 1524 - protein, 14 aa, Artificial Sequence
  Description of Artificial Sequence: Synthetic peptide
CARDRPTYYYMDVW

SEQ ID NO: 1525 - protein, 14 aa, Artificial Sequence
  Description of Artificial Sequence: Synthetic peptide
CARDRPYDYYMDVW

SEQ ID NO: 1526 - protein, 14 aa, Artificial Sequence
  Description of Artificial Sequence: Synthetic peptide
CARDRPYNYYMDVW

SEQ ID NO: 1527 - protein, 14 aa, Artificial Sequence
  Description of Artificial Sequence: Synthetic peptide
CARDRPYSYYMDVW

SEQ ID NO: 1528 - protein, 14 aa, Artificial Sequence
  Description of Artificial Sequence: Synthetic peptide
CARDRPYYYEMDVW

SEQ ID NO: 1529 - protein, 14 aa, Artificial Sequence
  Description of Artificial Sequence: Synthetic peptide
CARDRPYYYKMDVW

SEQ ID NO: 1530 - protein, 14 aa, Artificial Sequence
  Description of Artificial Sequence: Synthetic peptide
CARDRPYYYSMDVW

SEQ ID NO: 1531 - protein, 14 aa, Artificial Sequence
  Description of Artificial Sequence: Synthetic peptide
CARDRPYYYDIDVW

SEQ ID NO: 1532 - protein, 14 aa, Artificial Sequence
  Description of Artificial Sequence: Synthetic peptide
CARDRPYYYDLDVW

SEQ ID NO: 1533 - protein, 120 aa, Artificial Sequence
  Description of Artificial Sequence: Synthetic polypeptide
EVQLLESGGGLVQPGGSLRLSCAASGFTFDDYAMHWVRQAPGKGLEWVASITSSSAFIDYADSVKGRFTISRDNSKNTLYLQMNSLRAEDTAVYYCARERVDWFSYFDLWGQGTLVTVSS

SEQ ID NO: 1534 - protein, 120 aa, Artificial Sequence
  Description of Artificial Sequence: Synthetic polypeptide
EVQLLESGGGLVQPGGSLRLSCAASGFTFDDYAMHWVRQAPGKGLEWVASITSSSAFIDYADSVKGRFTISRDNSKNTLYLQMNSLRAEDTAVYYCARERVDWYSYFDLWGQGTLVTVSS

SEQ ID NO: 1535 - protein, 107 aa, Artificial Sequence
  Description of Artificial Sequence: Synthetic polypeptide
EIVMTQSPATLSVSPGERATLSCRASQSVYSNLVWYQQKPGQAPRLLIYRASTRATGIPARFSGSGSGTEFTLTISSLQSEDFAVYYCQQYHIWPPTFGQGTKVEIK

SEQ ID NO: 1536 - protein, 107 aa, Artificial Sequence
  Description of Artificial Sequence: Synthetic polypeptide
EIVMTQSPATLSVSPGERATLSCRASQSVYSNLAWYQQKPGQAPRLLIYDASTRATGIPARFSGSGSGTEFTLTISSLQSEDFAVYYCQQYHIWPPTFGQGTKVEIK

SEQ ID NO: 1537 - protein, 108 aa, Artificial Sequence
  Description of Artificial Sequence: Synthetic polypeptide
EIVMTQSPATLSVSPGERATLSCRASQSVYSNYLAWYQQKPGQAPRLLIYRASTRATGIPARFSGSGSGTEFTLTISSLQSEDFAVYYCQQYSHWPPTFGQGTKVEIK

SEQ ID NO: 1538-1539 - skipped (2 entries)

SEQ ID NO: 1540 - protein, 11 aa, Artificial Sequence
  Description of Artificial Sequence: Synthetic peptide
RASQSVYSNLV

SEQ ID NO: 1541 - protein, 12 aa, Artificial Sequence
  Description of Artificial Sequence: Synthetic peptide
RASQSVYSNYLA

SEQ ID NO: 1542 - protein, 119 aa, Artificial Sequence
  Description of Artificial Sequence: Synthetic polypeptide
EVQLLESGGGLVQPGGSLRLSCAASGFTFSSYWMHWVRQAPGKCLEWVSYISGSGGYTNYADSVKGRFTISRDNSKNTLYLQMNSLRAEDTAVYYCARDRPYYYDMDVWGKGTTVTVSS

SEQ ID NO: 1543 - protein, 107 aa, Artificial Sequence
  Description of Artificial Sequence: Synthetic polypeptide
DIQMTQSPSSLSASVGDRVTITCRASQSISSSLAWYQQKPGKAPKLLIYAASSLQSGVPSRFSGSGSGTDFTLTISSLQPEDFATYYCQQYKSYPVTFGCGTKVEIK

SEQ ID NO: 1544 - protein, 119 aa, Artificial Sequence
  Description of Artificial Sequence: Synthetic polypeptide
EVQLLESGGGLVQPGGSLRLSCAASGFTFSSYWMHWVRQAPGKCLEWVSYISGSGGYTNYADSVKGRFTISRDNSKNTLYLQMNSLRAEDTAVYYCARDRPYYYDIDVWGKGTTVTVSS

SEQ ID NO: 1545 - protein, 119 aa, Artificial Sequence
  Description of Artificial Sequence: Synthetic polypeptide
EVQLLESGGGLVQPGGSLRLSCAASGFTFSSYWMHWVRQAPGKCLEWVSYISGSGGYTNYADSVKGRFTISRDNSKNTLYLQMNSLRAEDTAVYYCARDRPYYYDLDVWGKGTTVTVSS

SEQ ID NO: 1546 - protein, 15 aa, Artificial Sequence
  Description of Artificial Sequence: Synthetic peptide
GGGSEGGGSEGGGSE

SEQ ID NO: 1547 - protein, 50 aa, Artificial Sequence
  Description of Artificial Sequence: Synthetic polypeptide
  SITE (1)..(50): This sequence may encompass 1-10 "Gly Gly Gly Ser Glu" repeating units
GGGSEGGGSEGGGSEGGGSEGGGSEGGGSEGGGSEGGGSEGGGSEGGGSE

SEQ ID NO: 1548 - protein, 120 aa, Artificial Sequence
  Description of Artificial Sequence: Synthetic polypeptide
EVQLLESGGGLVQPGGSLRLSCAASGFTFSDFWMHWVRQAPGKGLEWISYISGDSGYTNYADSVKGRFTISRDNSKNTLYLQMNSLRAEDTAVYYCARDRPYYYYMDVWGKGTTVTVSSV

SEQ ID NO: 1549 - protein, 25 aa, Artificial Sequence
  Description of Artificial Sequence: Synthetic peptide
  SITE (1)..(25): This sequence may encompass 1-5 "Gly Gly Gly Gly Ser" repeating units
GGGGSGGGGSGGGGSGGGGSGGGGS

SEQ ID NO: 1550 - protein, 50 aa, Artificial Sequence
  Description of Artificial Sequence: Synthetic polypeptide
  SITE (1)..(50): This sequence may encompass 1-10 "Gly Gly Gly Gly Ser" repeating units
GGGGSGGGGSGGGGSGGGGSGGGGSGGGGSGGGGSGGGGSGGGGSGGGGS

SEQ ID NO: 1551 - protein, 50 aa, Artificial Sequence
  Description of Artificial Sequence: Synthetic polypeptide
  SITE (1)..(50): This sequence may encompass 1-10 "Gly Gly Gly Gly Ala" repeating units
GGGGAGGGGAGGGGAGGGGAGGGGAGGGGAGGGGAGGGGAGGGGAGGGGA

SEQ ID NO: 1552 - protein, 133 aa, Artificial Sequence; identical to SEQ ID NO: 41
  Description of Artificial Sequence: Synthetic polypeptide

SEQ ID NO: 1553 - protein, 226 aa, Artificial Sequence; identical to SEQ ID NO: 21
  Description of Artificial Sequence: Synthetic polypeptide

SEQ ID NO: 1554 - protein, 394 aa, Artificial Sequence
  Description of Artificial Sequence: Synthetic polypeptide
  MOD_RES (134)..(153): This region may encompass one of the following sequences: "GGGGSGGGGSGGGGS" or "GGGGSGGGGSGGGGSGGGGS"
  MOD_RES (380)..(394): This region may encompass one of the following sequences: "GGGGS" or "GGGGSGGGGS" or "GGGGSGGGGSGGGGS"
APTSSSTKKTQLQLEHLLLDLQMILNGINNYKNPKLTRMLTFKFYMPKKATELKHLQCLEEELKPLEEALNLAPSKNFHLRPRDLISDINVIVLELKGSETTFMCEYADETATIVEFINRWITFSQSIISTLTXXXXXXXXXXXXXXXXXXXXDKTHTCPPCPAPEAAGAPSVFLFPPKPKDTLMISRTPEVTCVVVDVSHEDPEVKFNWYVDGVEVHNAKTKPREEQYNSTYRVVSVLTVLHQDWLNGKEYKCKVSNKALPAPIEKTISKAKGQPREPQVYTLPPSREEMTKNQVSLTCLVKGFYPSDIAVEWESNGQPENNYKTTPPVLDSDGSFFLYSKLTVDKSRWQQGNVFSCSVMHEALHNHYTQKSLSLSPGXXXXXXXXXXXXXXX

SEQ ID NO: 1555 - protein, 9 aa, Artificial Sequence
  Description of Artificial Sequence: Synthetic peptide
FTFSSYDMS
